United States Patent Application Publication US 2024/0360455 A1 - sequence listing, part 3

SEQ ID NO: 5111 - RNA, 23 nt, synthetic construct
  source 1..23: mol_type = other RNA
  modified_base 1: mod_base = OTHER; note = 2'-O-methyladenosine-3'-phosphorothioate
  modified_base 2: mod_base = OTHER; note = 2'-deoxy-2'-fluoroadenosine-3'-phosphorothioate
  modified_base 3: mod_base = OTHER; note = 2'-O-methylguanosine-3'-phosphate
  modified_base 4: mod_base = OTHER; note = 2'-O-methyladenosine-3'-phosphate
  modified_base 5: mod_base = OTHER; note = 2'-O-methyladenosine-3'-phosphate
  modified_base 6: mod_base = OTHER; note = 2'-deoxy-2'-fluorouridine-3'-phosphate
  modified_base 7: mod_base = OTHER; note = 2'-O-methyladenosine-3'-phosphate
  modified_base 8: mod_base = OTHER; note = 2'-deoxy-2'-fluorouridine-3'-phosphate
  modified_base 9: mod_base = OTHER; note = 2'-deoxy-2'-fluoroadenosine-3'-phosphate
  modified_base 10: mod_base = OTHER; note = 2'-O-methylcytidine-3'-phosphate
  modified_base 11: mod_base = OTHER; note = 2'-O-methyluridine-3'-phosphate
  modified_base 12: mod_base = OTHER; note = 2'-O-methylguanosine-3'-phosphate
  modified_base 13: mod_base = OTHER; note = 2'-O-methyladenosine-3'-phosphate
  modified_base 14: mod_base = OTHER; note = 2'-deoxy-2'-fluorouridine-3'-phosphate
  modified_base 15: mod_base = OTHER; note = 2'-O-methyluridine-3'-phosphate
  modified_base 16: mod_base = OTHER; note = 2'-deoxy-2'-fluorouridine-3'-phosphate
  modified_base 17: mod_base = OTHER; note = 2'-O-methylguanosine-3'-phosphate
  modified_base 18: mod_base = OTHER; note = 2'-O-methylcytidine-3'-phosphate
  modified_base 19: mod_base = OTHER; note = 2'-O-methyluridine-3'-phosphate
  modified_base 20: mod_base = OTHER; note = 2'-O-methyladenosine-3'-phosphate
  modified_base 21: mod_base = OTHER; note = 2'-O-methylcytidine-3'-phosphorothioate
  modified_base 22: mod_base = OTHER; note = 2'-O-methyluridine-3'-phosphorothioate
  modified_base 23: mod_base = OTHER; note = 2'-O-methyladenosine
aagaatatactgatttgctacta

SEQ ID NO: 5112 - RNA, 23 nt, synthetic construct
  source 1..23: mol_type = other RNA
  modified_base 1: mod_base = OTHER; note = 2'-O-methyladenosine-3'-phosphorothioate
  modified_base 2: mod_base = OTHER; note = 2'-deoxy-2'-fluorouridine-3'-phosphorothioate
  modified_base 3: mod_base = OTHER; note = 2'-O-methyluridine-3'-phosphate
  modified_base 4: mod_base = OTHER; note = 2'-O-methylguanosine-3'-phosphate
  modified_base 5: mod_base = OTHER; note = 2'-O-methyladenosine-3'-phosphate
  modified_base 6: mod_base = OTHER; note = 2'-deoxy-2'-fluorouridine-3'-phosphate
  modified_base 7: mod_base = OTHER; note = 2'-O-methyladenosine-3'-phosphate
  modified_base 8: mod_base = OTHER; note = 2'-deoxy-2'-fluoroadenosine-3'-phosphate
  modified_base 9: mod_base = OTHER; note = 2'-deoxy-2'-fluorouridine-3'-phosphate
  modified_base 10: mod_base = OTHER; note = 2'-O-methylcytidine-3'-phosphate
  modified_base 11: mod_base = OTHER; note = 2'-O-methyluridine-3'-phosphate
  modified_base 12: mod_base = OTHER; note = 2'-O-methylcytidine-3'-phosphate
  modified_base 13: mod_base = OTHER; note = 2'-O-methyluridine-3'-phosphate
  modified_base 14: mod_base = OTHER; note = 2'-deoxy-2'-fluorouridine-3'-phosphate
  modified_base 15: mod_base = OTHER; note = 2'-O-methylguanosine-3'-phosphate
  modified_base 16: mod_base = OTHER; note = 2'-deoxy-2'-fluorocytidine-3'-phosphate
  modified_base 17: mod_base = OTHER; note = 2'-O-methyluridine-3'-phosphate
  modified_base 18: mod_base = OTHER; note = 2'-O-methyluridine-3'-phosphate
  modified_base 19: mod_base = OTHER; note = 2'-O-methyluridine-3'-phosphate
  modified_base 20: mod_base = OTHER; note = 2'-O-methylcytidine-3'-phosphate
  modified_base 21: mod_base = OTHER; note = 2'-O-methylguanosine-3'-phosphorothioate
  modified_base 22: mod_base = OTHER; note = 2'-O-methyluridine-3'-phosphorothioate
  modified_base 23: mod_base = OTHER; note = 2'-O-methylguanosine
attgataatctcttgctttcgtg

SEQ ID NO: 5113 - RNA, 23 nt, synthetic construct
  source 1..23: mol_type = other RNA
  modified_base 1: mod_base = OTHER; note = 2'-O-methyladenosine-3'-phosphorothioate
  modified_base 2: mod_base = OTHER; note = 2'-deoxy-2'-fluoroguanosine-3'-phosphorothioate
  modified_base 3: mod_base = OTHER; note = 2'-O-methylcytidine-3'-phosphate
  modified_base 4: mod_base = OTHER; note = 2'-O-methyluridine-3'-phosphate
  modified_base 5: mod_base = OTHER; note = 2'-O-methylguanosine-3'-phosphate
  modified_base 6: mod_base = OTHER; note = 2'-deoxy-2'-fluoroadenosine-3'-phosphate
  modified_base 7: mod_base = OTHER; note = 2'-O-methyluridine-3'-phosphate
  modified_base 8: mod_base = OTHER; note = 2'-deoxy-2'-fluoroadenosine-3'-phosphate
  modified_base 9: mod_base = OTHER; note = 2'-deoxy-2'-fluoroguanosine-3'-phosphate
  modified_base 10: mod_base = OTHER; note = 2'-O-methyladenosine-3'-phosphate
  modified_base 11: mod_base = OTHER; note = 2'-O-methylguanosine-3'-phosphate
  modified_base 12: mod_base = OTHER; note = 2'-O-methyluridine-3'-phosphate
  modified_base 13: mod_base = OTHER; note = 2'-O-methylcytidine-3'-phosphate
  modified_base 14: mod_base = OTHER; note = 2'-deoxy-2'-fluorouridine-3'-phosphate
  modified_base 15: mod_base = OTHER; note = 2'-O-methylguanosine-3'-phosphate
  modified_base 16: mod_base = OTHER; note = 2'-deoxy-2'-fluorouridine-3'-phosphate
  modified_base 17: mod_base = OTHER; note = 2'-O-methylguanosine-3'-phosphate
  modified_base 18: mod_base = OTHER; note = 2'-O-methyluridine-3'-phosphate
  modified_base 19: mod_base = OTHER; note = 2'-O-methyluridine-3'-phosphate
  modified_base 20: mod_base = OTHER; note = 2'-O-methylguanosine-3'-phosphate
  modified_base 21: mod_base = OTHER; note = 2'-O-methylguanosine-3'-phosphorothioate
  modified_base 22: mod_base = OTHER; note = 2'-O-methyluridine-3'-phosphorothioate
  modified_base 23: mod_base = OTHER; note = 2'-O-methylcytidine
agctgatagagtctgtgttggtc

SEQ ID NO: 5114 - RNA, 23 nt, synthetic construct
  source 1..23: mol_type = other RNA
  modified_base 1: mod_base = OTHER; note = 2'-O-methyladenosine-3'-phosphorothioate
  modified_base 2: mod_base = OTHER; note = 2'-deoxy-2'-fluorouridine-3'-phosphorothioate
  modified_base 3: mod_base = OTHER; note = 2'-O-methyladenosine-3'-phosphate
  modified_base 4: mod_base = OTHER; note = 2'-O-methyluridine-3'-phosphate
  modified_base 5: mod_base = OTHER; note = 2'-O-methylcytidine-3'-phosphate
  modified_base 6: mod_base = OTHER; note = 2'-deoxy-2'-fluoroadenosine-3'-phosphate
  modified_base 7: mod_base = OTHER; note = 2'-O-methyladenosine-3'-phosphate
  modified_base 8: mod_base = OTHER; note = 2'-deoxy-2'-fluoroadenosine-3'-phosphate
  modified_base 9: mod_base = OTHER; note = 2'-deoxy-2'-fluorouridine-3'-phosphate
  modified_base 10: mod_base = OTHER; note = 2'-O-methyladenosine-3'-phosphate
  modified_base 11: mod_base = OTHER; note = 2'-O-methyluridine-3'-phosphate
  modified_base 12: mod_base = OTHER; note = 2'-O-methylcytidine-3'-phosphate
  modified_base 13: mod_base = OTHER; note = 2'-O-methyladenosine-3'-phosphate
  modified_base 14: mod_base = OTHER; note = 2'-deoxy-2'-fluorouridine-3'-phosphate
  modified_base 15: mod_base = OTHER; note = 2'-O-methyluridine-3'-phosphate
  modified_base 16: mod_base = OTHER; note = 2'-deoxy-2'-fluorocytidine-3'-phosphate
  modified_base 17: mod_base = OTHER; note = 2'-O-methyluridine-3'-phosphate
  modified_base 18: mod_base = OTHER; note = 2'-O-methyladenosine-3'-phosphate
  modified_base 19: mod_base = OTHER; note = 2'-O-methylguanosine-3'-phosphate
  modified_base 20: mod_base = OTHER; note = 2'-O-methyluridine-3'-phosphate
  modified_base 21: mod_base = OTHER; note = 2'-O-methylcytidine-3'-phosphorothioate
  modified_base 22: mod_base = OTHER; note = 2'-O-methyladenosine-3'-phosphorothioate
  modified_base 23: mod_base = OTHER; note = 2'-O-methylcytidine
atatcaaatatcattctagtcac

SEQ ID NO: 5115 - RNA, 23 nt, synthetic construct
  source 1..23: mol_type = other RNA
  modified_base 1: mod_base = OTHER; note = 2'-O-methyladenosine-3'-phosphorothioate
  modified_base 2: mod_base = OTHER; note = 2'-deoxy-2'-fluorocytidine-3'-phosphorothioate
  modified_base 3: mod_base = OTHER; note = 2'-O-methyluridine-3'-phosphate
  modified_base 4: mod_base = OTHER; note = 2'-O-methyladenosine-3'-phosphate
  modified_base 5: mod_base = OTHER; note = 2'-O-methyladenosine-3'-phosphate
  modified_base 6: mod_base = OTHER; note = 2'-deoxy-2'-fluoroadenosine-3'-phosphate
  modified_base 7: mod_base = OTHER; note = 2'-O-methyladenosine-3'-phosphate
  modified_base 8: mod_base = OTHER; note = 2'-deoxy-2'-fluoroguanosine-3'-phosphate
  modified_base 9: mod_base = OTHER; note = 2'-deoxy-2'-fluorocytidine-3'-phosphate
  modified_base 10: mod_base = OTHER; note = 2'-O-methyladenosine-3'-phosphate
  modified_base 11: mod_base = OTHER; note = 2'-O-methyladenosine-3'-phosphate
  modified_base 12: mod_base = OTHER; note = 2'-O-methyladenosine-3'-phosphate
  modified_base 13: mod_base = OTHER; note = 2'-O-methyluridine-3'-phosphate
  modified_base 14: mod_base = OTHER; note = 2'-deoxy-2'-fluorouridine-3'-phosphate
  modified_base 15: mod_base = OTHER; note = 2'-O-methylcytidine-3'-phosphate
  modified_base 16: mod_base = OTHER; note = 2'-deoxy-2'-fluorouridine-3'-phosphate
  modified_base 17: mod_base = OTHER; note = 2'-O-methylcytidine-3'-phosphate
  modified_base 18: mod_base = OTHER; note = 2'-O-methyladenosine-3'-phosphate
  modified_base 19: mod_base = OTHER; note = 2'-O-methylguanosine-3'-phosphate
  modified_base 20: mod_base = OTHER; note = 2'-O-methylguanosine-3'-phosphate
  modified_base 21: mod_base = OTHER; note = 2'-O-methylcytidine-3'-phosphorothioate
  modified_base 22: mod_base = OTHER; note = 2'-O-methyluridine-3'-phosphorothioate
  modified_base 23: mod_base = OTHER; note = 2'-O-methyluridine
actaaaagcaaattctcaggctt

SEQ ID NO: 5116 - RNA, 23 nt, synthetic construct
  source 1..23: mol_type = other RNA
  modified_base 1: mod_base = OTHER; note = 2'-O-methyladenosine-3'-phosphorothioate
  modified_base 2: mod_base = OTHER; note = 2'-deoxy-2'-fluorocytidine-3'-phosphorothioate
  modified_base 3: mod_base = OTHER; note = 2'-O-methyladenosine-3'-phosphate
  modified_base 4: mod_base = OTHER; note = 2'-O-methylguanosine-3'-phosphate
  modified_base 5: mod_base = OTHER; note = 2'-O-methyladenosine-3'-phosphate
  modified_base 6: mod_base = OTHER; note = 2'-deoxy-2'-fluoroadenosine-3'-phosphate
  modified_base 7: mod_base = OTHER; note = 2'-O-methylguanosine-3'-phosphate
  modified_base 8: mod_base = OTHER; note = 2'-deoxy-2'-fluoroadenosine-3'-phosphate
  modified_base 9: mod_base = OTHER; note = 2'-deoxy-2'-fluoroguanosine-3'-phosphate
  modified_base 10: mod_base = OTHER; note = 2'-O-methyladenosine-3'-phosphate
  modified_base 11: mod_base = OTHER; note = 2'-O-methylcytidine-3'-phosphate
  modified_base 12: mod_base = OTHER; note = 2'-O-methylcytidine-3'-phosphate
  modified_base 13: mod_base = OTHER; note = 2'-O-methyladenosine-3'-phosphate
  modified_base 14: mod_base = OTHER; note = 2'-deoxy-2'-fluorouridine-3'-phosphate
  modified_base 15: mod_base = OTHER; note = 2'-O-methyluridine-3'-phosphate
  modified_base 16: mod_base = OTHER; note = 2'-deoxy-2'-fluoroguanosine-3'-phosphate
  modified_base 17: mod_base = OTHER; note = 2'-O-methyluridine-3'-phosphate
  modified_base 18: mod_base = OTHER; note = 2'-O-methyluridine-3'-phosphate
  modified_base 19: mod_base = OTHER; note = 2'-O-methyluridine-3'-phosphate
  modified_base 20: mod_base = OTHER; note = 2'-O-methyluridine-3'-phosphate
  modified_base 21: mod_base = OTHER; note = 2'-O-methylguanosine-3'-phosphorothioate
  modified_base 22: mod_base = OTHER; note = 2'-O-methylcytidine-3'-phosphorothioate
  modified_base 23: mod_base = OTHER; note = 2'-O-methyluridine
acagaagagaccattgttttgct

SEQ ID NO: 5117 - RNA, 23 nt, synthetic construct
  source 1..23: mol_type = other RNA
  modified_base 1: mod_base = OTHER; note = 2'-O-methyladenosine-3'-phosphorothioate
  modified_base 2: mod_base = OTHER; note = 2'-deoxy-2'-fluorocytidine-3'-phosphorothioate
  modified_base 3: mod_base = OTHER; note = 2'-O-methylguanosine-3'-phosphate
  modified_base 4: mod_base = OTHER; note = 2'-O-methyluridine-3'-phosphate
  modified_base 5: mod_base = OTHER; note = 2'-O-methyluridine-3'-phosphate
  modified_base 6: mod_base = OTHER; note = 2'-deoxy-2'-fluoroguanosine-3'-phosphate
  modified_base 7: mod_base = OTHER; note = 2'-O-methylguanosine-3'-phosphate
  modified_base 8: mod_base = OTHER; note = 2'-deoxy-2'-fluorocytidine-3'-phosphate
  modified_base 9: mod_base = OTHER; note = 2'-deoxy-2'-fluorouridine-3'-phosphate
  modified_base 10: mod_base = OTHER; note = 2'-O-methyluridine-3'-phosphate
  modified_base 11: mod_base = OTHER; note = 2'-O-methyluridine-3'-phosphate
  modified_base 12: mod_base = OTHER; note = 2'-O-methylguanosine-3'-phosphate
  modified_base 13: mod_base = OTHER; note = 2'-O-methyluridine-3'-phosphate
  modified_base 14: mod_base = OTHER; note = 2'-deoxy-2'-fluorouridine-3'-phosphate
  modified_base 15: mod_base = OTHER; note = 2'-O-methylguanosine-3'-phosphate
  modified_base 16: mod_base = OTHER; note = 2'-deoxy-2'-fluorouridine-3'-phosphate
  modified_base 17: mod_base = OTHER; note = 2'-O-methyluridine-3'-phosphate
  modified_base 18: mod_base = OTHER; note = 2'-O-methyluridine-3'-phosphate
  modified_base 19: mod_base = OTHER; note = 2'-O-methyladenosine-3'-phosphate
  modified_base 20: mod_base = OTHER; note = 2'-O-methyluridine-3'-phosphate
  modified_base 21: mod_base = OTHER; note = 2'-O-methylcytidine-3'-phosphorothioate
  modified_base 22: mod_base = OTHER; note = 2'-O-methyluridine-3'-phosphorothioate
  modified_base 23: mod_base = OTHER; note = 2'-O-methyluridine
acgttggctttgttgtttatctt

SEQ ID NO: 5118 - RNA, 23 nt, synthetic construct
  source 1..23: mol_type = other RNA
  modified_base 1: mod_base = OTHER; note = 2'-O-methyladenosine-3'-phosphorothioate
  modified_base 2: mod_base = OTHER; note = 2'-deoxy-2'-fluoroguanosine-3'-phosphorothioate
  modified_base 3: mod_base = OTHER; note = 2'-O-methyladenosine-3'-phosphate
  modified_base 4: mod_base = OTHER; note = 2'-O-methylcytidine-3'-phosphate
  modified_base 5: mod_base = OTHER; note = 2'-O-methyladenosine-3'-phosphate
  modified_base 6: mod_base = OTHER; note = 2'-deoxy-2'-fluoroguanosine-3'-phosphate
  modified_base 7: mod_base = OTHER; note = 2'-O-methylguanosine-3'-phosphate
  modified_base 8: mod_base = OTHER; note = 2'-deoxy-2'-fluorouridine-3'-phosphate
  modified_base 9: mod_base = OTHER; note = 2'-deoxy-2'-fluorouridine-3'-phosphate
  modified_base 10: mod_base = OTHER; note = 2'-O-methylcytidine-3'-phosphate
  modified_base 11: mod_base = OTHER; note = 2'-O-methylguanosine-3'-phosphate
  modified_base 12: mod_base = OTHER; note = 2'-O-methyluridine-3'-phosphate
  modified_base 13: mod_base = OTHER; note = 2'-O-methyladenosine-3'-phosphate
  modified_base 14: mod_base = OTHER; note = 2'-deoxy-2'-fluorouridine-3'-phosphate
  modified_base 15: mod_base = OTHER; note = 2'-O-methyluridine-3'-phosphate
  modified_base 16: mod_base = OTHER; note = 2'-deoxy-2'-fluoroadenosine-3'-phosphate
  modified_base 17: mod_base = OTHER; note = 2'-O-methyladenosine-3'-phosphate
  modified_base 18: mod_base = OTHER; note = 2'-O-methyladenosine-3'-phosphate
  modified_base 19: mod_base = OTHER; note = 2'-O-methyladenosine-3'-phosphate
  modified_base 20: mod_base = OTHER; note = 2'-O-methyladenosine-3'-phosphate
  modified_base 21: mod_base = OTHER; note = 2'-O-methyladenosine-3'-phosphorothioate
  modified_base 22: mod_base = OTHER; note = 2'-O-methyladenosine-3'-phosphorothioate
  modified_base 23: mod_base = OTHER; note = 2'-O-methyladenosine
agacaggttcgtattaaaaaaaa

SEQ ID NO: 5119 - RNA, 23 nt, synthetic construct
  source 1..23: mol_type = other RNA
  modified_base 1: mod_base = OTHER; note = 2'-O-methyladenosine-3'-phosphorothioate
  modified_base 2: mod_base = OTHER; note = 2'-deoxy-2'-fluorocytidine-3'-phosphorothioate
  modified_base 3: mod_base = OTHER; note = 2'-O-methyluridine-3'-phosphate
  modified_base 4: mod_base = OTHER; note = 2'-O-methyluridine-3'-phosphate
  modified_base 5: mod_base = OTHER; note = 2'-O-methyladenosine-3'-phosphate
  modified_base 6: mod_base = OTHER; note = 2'-deoxy-2'-fluoroadenosine-3'-phosphate
  modified_base 7: mod_base = OTHER; note = 2'-O-methylguanosine-3'-phosphate
  modified_base 8: mod_base = OTHER; note = 2'-deoxy-2'-fluorocytidine-3'-phosphate
  modified_base 9: mod_base = OTHER; note = 2'-deoxy-2'-fluoroadenosine-3'-phosphate
  modified_base 10: mod_base = OTHER; note = 2'-O-methylguanosine-3'-phosphate
  modified_base 11: mod_base = OTHER; note = 2'-O-methyladenosine-3'-phosphate
  modified_base 12: mod_base = OTHER; note = 2'-O-methyladenosine-3'-phosphate
  modified_base 13: mod_base = OTHER; note = 2'-O-methyluridine-3'-phosphate
  modified_base 14: mod_base = OTHER; note = 2'-deoxy-2'-fluorouridine-3'-phosphate
  modified_base 15: mod_base = OTHER; note = 2'-O-methyladenosine-3'-phosphate
  modified_base 16: mod_base = OTHER; note = 2'-deoxy-2'-fluorouridine-3'-phosphate
  modified_base 17: mod_base = OTHER; note = 2'-O-methyladenosine-3'-phosphate
  modified_base 18: mod_base = OTHER; note = 2'-O-methyladenosine-3'-phosphate
  modified_base 19: mod_base = OTHER; note = 2'-O-methyladenosine-3'-phosphate
  modified_base 20: mod_base = OTHER; note = 2'-O-methylcytidine-3'-phosphate
  modified_base 21: mod_base = OTHER; note = 2'-O-methylcytidine-3'-phosphorothioate
  modified_base 22: mod_base = OTHER; note = 2'-O-methyluridine-3'-phosphorothioate
  modified_base 23: mod_base = OTHER; note = 2'-O-methyluridine
acttaagcagaattataaacctt

SEQ ID NO: 5120 - RNA, 23 nt, synthetic construct
  source 1..23: mol_type = other RNA
  modified_base 1: mod_base = OTHER; note = 2'-O-methyladenosine-3'-phosphorothioate
  modified_base 2: mod_base = OTHER; note = 2'-deoxy-2'-fluoroguanosine-3'-phosphorothioate
  modified_base 3: mod_base = OTHER; note = 2'-O-methyladenosine-3'-phosphate
  modified_base 4: mod_base = OTHER; note = 2'-O-methylguanosine-3'-phosphate
  modified_base 5: mod_base = OTHER; note = 2'-O-methylguanosine-3'-phosphate
  modified_base 6: mod_base = OTHER; note = 2'-deoxy-2'-fluoroadenosine-3'-phosphate
  modified_base 7: mod_base = OTHER; note = 2'-O-methyladenosine-3'-phosphate
  modified_base 8: mod_base = OTHER; note = 2'-deoxy-2'-fluorocytidine-3'-phosphate
  modified_base 9: mod_base = OTHER; note = 2'-deoxy-2'-fluorouridine-3'-phosphate
  modified_base 10: mod_base = OTHER; note = 2'-O-methyluridine-3'-phosphate
  modified_base 11: mod_base = OTHER; note = 2'-O-methylguanosine-3'-phosphate
  modified_base 12: mod_base = OTHER; note = 2'-O-methylcytidine-3'-phosphate
  modified_base 13: mod_base = OTHER; note = 2'-O-methyluridine-3'-phosphate
  modified_base 14: mod_base = OTHER; note = 2'-deoxy-2'-fluorouridine-3'-phosphate
  modified_base 15: mod_base = OTHER; note = 2'-O-methyluridine-3'-phosphate
  modified_base 16: mod_base = OTHER; note = 2'-deoxy-2'-fluorouridine-3'-phosphate
  modified_base 17: mod_base = OTHER; note = 2'-O-methyladenosine-3'-phosphate
  modified_base 18: mod_base = OTHER; note = 2'-O-methyluridine-3'-phosphate
  modified_base 19: mod_base = OTHER; note = 2'-O-methylcytidine-3'-phosphate
  modified_base 20: mod_base = OTHER; note = 2'-O-methylcytidine-3'-phosphate
  modified_base 21: mod_base = OTHER; note = 2'-O-methyluridine-3'-phosphorothioate
  modified_base 22: mod_base = OTHER; note = 2'-O-methyladenosine-3'-phosphorothioate
  modified_base 23: mod_base = OTHER; note = 2'-O-methyladenosine
agaggaacttgcttttatcctaa

SEQ ID NO: 5121 - RNA, 23 nt, synthetic construct
  source 1..23: mol_type = other RNA
  modified_base 1: mod_base = OTHER; note = 2'-O-methyladenosine-3'-phosphorothioate
  modified_base 2: mod_base = OTHER; note = 2'-deoxy-2'-fluorouridine-3'-phosphorothioate
  modified_base 3: mod_base = OTHER; note = 2'-O-methylguanosine-3'-phosphate
  modified_base 4: mod_base = OTHER; note = 2'-O-methyluridine-3'-phosphate
  modified_base 5: mod_base = OTHER; note = 2'-O-methyladenosine-3'-phosphate
  modified_base 6: mod_base = OTHER; note = 2'-deoxy-2'-fluoroadenosine-3'-phosphate
  modified_base 7: mod_base = OTHER; note = 2'-O-methyladenosine-3'-phosphate
  modified_base 8: mod_base = OTHER; note = 2'-deoxy-2'-fluoroadenosine-3'-phosphate
  modified_base 9: mod_base = OTHER; note = 2'-deoxy-2'-fluoroadenosine-3'-phosphate
  modified_base 10: mod_base = OTHER; note = 2'-O-methyladenosine-3'-phosphate
  modified_base 11: mod_base = OTHER; note = 2'-O-methyladenosine-3'-phosphate
  modified_base 12: mod_base = OTHER; note = 2'-O-methyladenosine-3'-phosphate
  modified_base 13: mod_base = OTHER; note = 2'-O-methylcytidine-3'-phosphate
  modified_base 14: mod_base = OTHER; note = 2'-deoxy-2'-fluoroadenosine-3'-phosphate
  modified_base 15: mod_base = OTHER; note = 2'-O-methylcytidine-3'-phosphate
  modified_base 16: mod_base = OTHER; note = 2'-deoxy-2'-fluorouridine-3'-phosphate
  modified_base 17: mod_base = OTHER; note = 2'-O-methylcytidine-3'-phosphate
  modified_base 18: mod_base = OTHER; note = 2'-O-methyluridine-3'-phosphate
  modified_base 19: mod_base = OTHER; note = 2'-O-methyladenosine-3'-phosphate
  modified_base 20: mod_base = OTHER; note = 2'-O-methylcytidine-3'-phosphate
  modified_base 21: mod_base = OTHER; note = 2'-O-methyladenosine-3'-phosphorothioate
  modified_base 22: mod_base = OTHER; note = 2'-O-methyluridine-3'-phosphorothioate
  modified_base 23: mod_base = OTHER; note = 2'-O-methylcytidine
atgtaaaaaaaacactctacatc

SEQ ID NO: 5122 - RNA, 23 nt, synthetic construct
  source 1..23: mol_type = other RNA
  modified_base 1: mod_base = OTHER; note = 2'-O-methyladenosine-3'-phosphorothioate
  modified_base 2: mod_base = OTHER; note = 2'-deoxy-2'-fluorouridine-3'-phosphorothioate
  modified_base 3: mod_base = OTHER; note = 2'-O-methyladenosine-3'-phosphate
  modified_base 4: mod_base = OTHER; note = 2'-O-methylcytidine-3'-phosphate
  modified_base 5: mod_base = OTHER; note = 2'-O-methyladenosine-3'-phosphate
  modified_base 6: mod_base = OTHER; note = 2'-deoxy-2'-fluoroadenosine-3'-phosphate
  modified_base 7: mod_base = OTHER; note = 2'-O-methylcytidine-3'-phosphate
  modified_base 8: mod_base = OTHER; note = 2'-deoxy-2'-fluorouridine-3'-phosphate
  modified_base 9: mod_base = OTHER; note = 2'-deoxy-2'-fluoroguanosine-3'-phosphate
  modified_base 10: mod_base = OTHER; note = 2'-O-methyluridine-3'-phosphate
  modified_base 11: mod_base = OTHER; note = 2'-O-methylcytidine-3'-phosphate
  modified_base 12: mod_base = OTHER; note = 2'-O-methyladenosine-3'-phosphate
  modified_base 13: mod_base = OTHER; note = 2'-O-methyluridine-3'-phosphate
  modified_base 14: mod_base = OTHER; note = 2'-deoxy-2'-fluorouridine-3'-phosphate
  modified_base 15: mod_base = OTHER; note = 2'-O-methylcytidine-3'-phosphate
  modified_base 16: mod_base = OTHER; note = 2'-deoxy-2'-fluoroadenosine-3'-phosphate
  modified_base 17: mod_base = OTHER; note = 2'-O-methylguanosine-3'-phosphate
  modified_base 18: mod_base = OTHER; note = 2'-O-methyladenosine-3'-phosphate
  modified_base 19: mod_base = OTHER; note = 2'-O-methylguanosine-3'-phosphate
  modified_base 20: mod_base = OTHER; note = 2'-O-methyladenosine-3'-phosphate
  modified_base 21: mod_base = OTHER; note = 2'-O-methyladenosine-3'-phosphorothioate
  modified_base 22: mod_base = OTHER; note = 2'-O-methylcytidine-3'-phosphorothioate
  modified_base 23: mod_base = OTHER; note = 2'-O-methyladenosine
atacaactgtcattcagagaaca

SEQ ID NO: 5123 - RNA, 23 nt, synthetic construct
  source 1..23: mol_type = other RNA
  modified_base 1: mod_base = OTHER; note = 2'-O-methyladenosine-3'-phosphorothioate
  modified_base 2: mod_base = OTHER; note = 2'-deoxy-2'-fluoroadenosine-3'-phosphorothioate
  modified_base 3: mod_base = OTHER; note = 2'-O-methylcytidine-3'-phosphate
  modified_base 4: mod_base = OTHER; note = 2'-O-methyladenosine-3'-phosphate
  modified_base 5: mod_base = OTHER; note = 2'-O-methylguanosine-3'-phosphate
  modified_base 6: mod_base = OTHER; note = 2'-deoxy-2'-fluoroguanosine-3'-phosphate
  modified_base 7: mod_base = OTHER; note = 2'-O-methyladenosine-3'-phosphate
  modified_base 8: mod_base = OTHER; note = 2'-deoxy-2'-fluoroguanosine-3'-phosphate
  modified_base 9: mod_base = OTHER; note = 2'-deoxy-2'-fluoroadenosine-3'-phosphate
  modified_base 10: mod_base = OTHER; note = 2'-O-methylguanosine-3'-phosphate
  modified_base 11: mod_base = OTHER; note = 2'-O-methylguanosine-3'-phosphate
  modified_base 12: mod_base = OTHER; note = 2'-O-methyluridine-3'-phosphate
  modified_base 13: mod_base = OTHER; note = 2'-O-methyladenosine-3'-phosphate
  modified_base 14: mod_base = OTHER; note = 2'-deoxy-2'-fluoroadenosine-3'-phosphate
  modified_base 15: mod_base = OTHER; note = 2'-O-methyladenosine-3'-phosphate
  modified_base 16: mod_base = OTHER; note = 2'-deoxy-2'-fluorouridine-3'-phosphate
  modified_base 17: mod_base = OTHER; note = 2'-O-methyladenosine-3'-phosphate
  modified_base 18: mod_base = OTHER; note = 2'-O-methylcytidine-3'-phosphate
  modified_base 19: mod_base = OTHER; note = 2'-O-methyladenosine-3'-phosphate
  modified_base 20: mod_base = OTHER; note = 2'-O-methyladenosine-3'-phosphate
  modified_base 21: mod_base = OTHER; note = 2'-O-methyluridine-3'-phosphorothioate
  modified_base 22: mod_base = OTHER; note = 2'-O-methylcytidine-3'-phosphorothioate
  modified_base 23: mod_base = OTHER; note = 2'-O-methyluridine
aacaggagaggtaaatacaatct

SEQ ID NO: 5124 - RNA, 23 nt, synthetic construct
  source 1..23: mol_type = other RNA
  modified_base 1: mod_base = OTHER; note = 2'-O-methyladenosine-3'-phosphorothioate
  modified_base 2: mod_base = OTHER; note = 2'-deoxy-2'-fluorocytidine-3'-phosphorothioate
  modified_base 3: mod_base = OTHER; note = 2'-O-methyluridine-3'-phosphate
  modified_base 4: mod_base = OTHER; note = 2'-O-methyluridine-3'-phosphate
  modified_base 5: mod_base = OTHER; note = 2'-O-methyluridine-3'-phosphate
  modified_base 6: mod_base = OTHER; note = 2'-deoxy-2'-fluoroadenosine-3'-phosphate
  modified_base 7: mod_base = OTHER; note = 2'-O-methyladenosine-3'-phosphate
  modified_base 8: mod_base = OTHER; note = 2'-deoxy-2'-fluoroadenosine-3'-phosphate
  modified_base 9: mod_base = OTHER; note = 2'-deoxy-2'-fluorouridine-3'-phosphate
  modified_base 10: mod_base = OTHER; note = 2'-O-methyladenosine-3'-phosphate
  modified_base 11: mod_base = OTHER; note = 2'-O-methylcytidine-3'-phosphate
  modified_base 12: mod_base = OTHER; note = 2'-O-methyladenosine-3'-phosphate
  modified_base 13: mod_base = OTHER; note = 2'-O-methyluridine-3'-phosphate
  modified_base 14: mod_base = OTHER; note = 2'-deoxy-2'-fluoroguanosine-3'-phosphate
  modified_base 15: mod_base = OTHER; note = 2'-O-methyluridine-3'-phosphate
  modified_base 16: mod_base = OTHER; note = 2'-deoxy-2'-fluoroadenosine-3'-phosphate
  modified_base 17: mod_base = OTHER; note = 2'-O-methyluridine-3'-phosphate
  modified_base 18: mod_base = OTHER; note = 2'-O-methylguanosine-3'-phosphate
  modified_base 19: mod_base = OTHER; note = 2'-O-methylcytidine-3'-phosphate
  modified_base 20: mod_base = OTHER; note = 2'-O-methylcytidine-3'-phosphate
  modified_base 21: mod_base = OTHER; note = 2'-O-methyladenosine-3'-phosphorothioate
  modified_base 22: mod_base = OTHER; note = 2'-O-methylcytidine-3'-phosphorothioate
  modified_base 23: mod_base = OTHER; note = 2'-O-methylguanosine
actttaaatacatgtatgccacg

SEQ ID NO: 5125 - RNA, 23 nt, synthetic construct
  source 1..23: mol_type = other RNA
  modified_base 1: mod_base = OTHER; note = 2'-O-methyladenosine-3'-phosphorothioate
  modified_base 2: mod_base = OTHER; note = 2'-deoxy-2'-fluoroadenosine-3'-phosphorothioate
  modified_base 3: mod_base = OTHER; note = 2'-O-methyladenosine-3'-phosphate
  modified_base 4: mod_base = OTHER; note = 2'-O-methylcytidine-3'-phosphate
  modified_base 5: mod_base = OTHER; note = 2'-O-methylcytidine-3'-phosphate
  modified_base 6: mod_base = OTHER; note = 2'-deoxy-2'-fluorouridine-3'-phosphate
  modified_base 7: mod_base = OTHER; note = 2'-O-methyluridine-3'-phosphate
  modified_base 8: mod_base = OTHER; note = 2'-deoxy-2'-fluorouridine-3'-phosphate
  modified_base 9: mod_base = OTHER; note = 2'-deoxy-2'-fluoroadenosine-3'-phosphate
  modified_base 10: mod_base = OTHER; note = 2'-O-methyladenosine-3'-phosphate
  modified_base 11: mod_base = OTHER; note = 2'-O-methyladenosine-3'-phosphate
  modified_base 12: mod_base = OTHER; note = 2'-O-methyladenosine-3'-phosphate
  modified_base 13: mod_base = OTHER; note = 2'-O-methyluridine-3'-phosphate
  modified_base 14: mod_base = OTHER; note = 2'-deoxy-2'-fluorocytidine-3'-phosphate
  modified_base 15: mod_base = OTHER; note = 2'-O-methyluridine-3'-phosphate
  modified_base 16: mod_base = OTHER; note = 2'-deoxy-2'-fluorouridine-3'-phosphate
  modified_base 17: mod_base = OTHER; note = 2'-O-methylguanosine-3'-phosphate
  modified_base 18: mod_base = OTHER; note = 2'-O-methyladenosine-3'-phosphate
  modified_base 19: mod_base = OTHER; note = 2'-O-methylcytidine-3'-phosphate
  modified_base 20: mod_base = OTHER; note = 2'-O-methyladenosine-3'-phosphate
  modified_base 21: mod_base = OTHER; note = 2'-O-methyladenosine-3'-phosphorothioate
  modified_base 22: mod_base = OTHER; note = 2'-O-methylcytidine-3'-phosphorothioate
  modified_base 23: mod_base = OTHER; note = 2'-O-methyladenosine
aaacctttaaaatcttgacaaca

SEQ ID NO: 5126 - RNA, 23 nt, synthetic construct
  source 1..23: mol_type = other RNA
  modified_base 1: mod_base = OTHER; note = 2'-O-methyladenosine-3'-phosphorothioate
  modified_base 2: mod_base = OTHER; note = 2'-deoxy-2'-fluoroguanosine-3'-phosphorothioate
  modified_base 3: mod_base = OTHER; note = 2'-O-methyluridine-3'-phosphate
  modified_base 4: mod_base = OTHER; note = 2'-O-methylcytidine-3'-phosphate
  modified_base 5: mod_base = OTHER; note = 2'-O-methylcytidine-3'-phosphate
  modified_base 6: mod_base = OTHER; note = 2'-deoxy-2'-fluoroadenosine-3'-phosphate
  modified_base 7: mod_base = OTHER; note = 2'-O-methylguanosine-3'-phosphate
  modified_base 8: mod_base = OTHER; note = 2'-deoxy-2'-fluorouridine-3'-phosphate
  modified_base 9: mod_base = OTHER; note = 2'-deoxy-2'-fluoroadenosine-3'-phosphate
  modified_base 10: mod_base = OTHER; note = 2'-O-methylguanosine-3'-phosphate
  modified_base 11: mod_base = OTHER; note = 2'-O-methylguanosine-3'-phosphate
  modified_base 12: mod_base = OTHER; note = 2'-O-methyladenosine-3'-phosphate
  modified_base 13: mod_base = OTHER; note = 2'-O-methyladenosine-3'-phosphate
  modified_base 14: mod_base = OTHER; note = 2'-deoxy-2'-fluorouridine-3'-phosphate
  modified_base 15: mod_base = OTHER; note = 2'-O-methyluridine-3'-phosphate
  modified_base 16: mod_base = OTHER; note = 2'-deoxy-2'-fluorouridine-3'-phosphate
  modified_base 17: mod_base = OTHER; note = 2'-O-methyluridine-3'-phosphate
  modified_base 18: mod_base = OTHER; note = 2'-O-methylcytidine-3'-phosphate
  modified_base 19: mod_base = OTHER; note = 2'-O-methyladenosine-3'-phosphate
  modified_base 20: mod_base = OTHER; note = 2'-O-methyluridine-3'-phosphate
  modified_base 21: mod_base = OTHER; note = 2'-O-methyladenosine-3'-phosphorothioate
  modified_base 22: mod_base = OTHER; note = 2'-O-methylcytidine-3'-phosphorothioate
  modified_base 23: mod_base = OTHER; note = 2'-O-methyladenosine
agtccagtaggaattttcataca

SEQ ID NO: 5127 - RNA, 23 nt, synthetic construct
  source 1..23: mol_type = other RNA
  modified_base 1: mod_base = OTHER; note = 2'-O-methyladenosine-3'-phosphorothioate
  modified_base 2: mod_base = OTHER; note = 2'-deoxy-2'-fluoroguanosine-3'-phosphorothioate
  modified_base 3: mod_base = OTHER; note = 2'-O-methyladenosine-3'-phosphate
  modified_base 4: mod_base = OTHER; note = 2'-O-methyluridine-3'-phosphate
  modified_base 5: mod_base = OTHER; note = 2'-O-methylguanosine-3'-phosphate
  modified_base 6: mod_base = OTHER; note = 2'-deoxy-2'-fluorouridine-3'-phosphate
  modified_base 7: mod_base = OTHER; note = 2'-O-methyluridine-3'-phosphate
  modified_base 8: mod_base = OTHER; note = 2'-deoxy-2'-fluorouridine-3'-phosphate
  modified_base 9: mod_base = OTHER; note = 2'-deoxy-2'-fluorouridine-3'-phosphate
  modified_base 10: mod_base = OTHER; note = 2'-O-methylguanosine-3'-phosphate
  modified_base 11: mod_base = OTHER; note = 2'-O-methylcytidine-3'-phosphate
  modified_base 12: mod_base = OTHER; note = 2'-O-methylcytidine-3'-phosphate
  modified_base 13: mod_base = OTHER; note = 2'-O-methyladenosine-3'-phosphate
  modified_base 14: mod_base = OTHER; note = 2'-deoxy-2'-fluorocytidine-3'-phosphate
  modified_base 15: mod_base = OTHER; note = 2'-O-methyladenosine-3'-phosphate
  modified_base 16: mod_base = OTHER; note = 2'-deoxy-2'-fluoroadenosine-3'-phosphate
  modified_base 17: mod_base = OTHER; note = 2'-O-methyladenosine-3'-phosphate
  modified_base 18: mod_base = OTHER; note = 2'-O-methylguanosine-3'-phosphate
  modified_base 19: mod_base = OTHER; note = 2'-O-methyladenosine-3'-phosphate
  modified_base 20: mod_base = OTHER; note = 2'-O-methylguanosine-3'-phosphate
  modified_base 21: mod_base = OTHER; note = 2'-O-methylguanosine-3'-phosphorothioate
  modified_base 22: mod_base = OTHER; note = 2'-O-methyluridine-3'-phosphorothioate
  modified_base 23: mod_base = OTHER; note = 2'-O-methylguanosine
agatgttttgccacaaagaggtg

SEQ ID NO: 5128 - RNA, 23 nt, synthetic construct
  source 1..23: mol_type = other RNA
  modified_base 1: mod_base = OTHER; note = 2'-O-methyladenosine-3'-phosphorothioate
  modified_base 2: mod_base = OTHER; note = 2'-deoxy-2'-fluoroadenosine-3'-phosphorothioate
  modified_base 3: mod_base = OTHER; note = 2'-O-methylcytidine-3'-phosphate
  modified_base 4: mod_base = OTHER; note = 2'-O-methyladenosine-3'-phosphate
  modified_base 5: mod_base = OTHER; note = 2'-O-methylcytidine-3'-phosphate
  modified_base 6: mod_base = OTHER; note = 2'-deoxy-2'-fluoroguanosine-3'-phosphate
  modified_base 7: mod_base = OTHER; note = 2'-O-methyladenosine-3'-phosphate
  modified_base 8: mod_base = OTHER; note = 2'-deoxy-2'-fluoroguanosine-3'-phosphate
  modified_base 9: mod_base = OTHER; note = 2'-deoxy-2'-fluorouridine-3'-phosphate
  modified_base 10: mod_base = OTHER; note = 2'-O-methylcytidine-3'-phosphate
  modified_base 11: mod_base = OTHER; note = 2'-O-methyluridine-3'-phosphate
  modified_base 12: mod_base = OTHER; note = 2'-O-methylcytidine-3'-phosphate
  modified_base 13: mod_base = OTHER; note = 2'-O-methyluridine-3'-phosphate
  modified_base 14: mod_base = OTHER; note = 2'-deoxy-2'-fluorouridine-3'-phosphate
  modified_base 15: mod_base = OTHER; note = 2'-O-methylcytidine-3'-phosphate
  modified_base 16: mod_base = OTHER; note = 2'-deoxy-2'-fluorouridine-3'-phosphate
  modified_base 17: mod_base = OTHER; note = 2'-O-methylguanosine-3'-phosphate
  modified_base 18: mod_base = OTHER; note = 2'-O-methyladenosine-3'-phosphate
  modified_base 19: mod_base = OTHER; note = 2'-O-methylcytidine-3'-phosphate
  modified_base 20: mod_base = OTHER; note = 2'-O-methyluridine-3'-phosphate
  modified_base 21: mod_base = OTHER; note = 2'-O-methylguanosine-3'-phosphorothioate
  modified_base 22: mod_base = OTHER; note = 2'-O-methylcytidine-3'-phosphorothioate
  modified_base 23: mod_base = OTHER; note = 2'-O-methyladenosine
aacacgagtctcttctgactgca

SEQ ID NO: 5129 - RNA, 23 nt, synthetic construct
  source 1..23: mol_type = other RNA
  modified_base 1: mod_base = OTHER; note = 2'-O-methyladenosine-3'-phosphorothioate
  modified_base 2: mod_base = OTHER; note = 2'-deoxy-2'-fluoroguanosine-3'-phosphorothioate
  modified_base 3: mod_base = OTHER; note = 2'-O-methyladenosine-3'-phosphate
  modified_base 4: mod_base = OTHER; note = 2'-O-methyluridine-3'-phosphate
  modified_base 5: mod_base = OTHER; note = 2'-O-methylcytidine-3'-phosphate
  modified_base 6: mod_base = OTHER; note = 2'-deoxy-2'-fluoroadenosine-3'-phosphate
  modified_base 7: mod_base = OTHER; note = 2'-O-methylguanosine-3'-phosphate
  modified_base 8: mod_base = OTHER; note = 2'-deoxy-2'-fluorouridine-3'-phosphate
  modified_base 9: mod_base = OTHER; note = 2'-deoxy-2'-fluorouridine-3'-phosphate
  modified_base 10: mod_base = OTHER; note = 2'-O-methylguanosine-3'-phosphate
  modified_base 11: mod_base = OTHER; note = 2'-O-methyluridine-3'-phosphate
  modified_base 12: mod_base = OTHER; note = 2'-O-methyluridine-3'-phosphate
  modified_base 13: mod_base = OTHER; note = 2'-O-methylcytidine-3'-phosphate
  modified_base 14: mod_base = OTHER; note = 2'-deoxy-2'-fluoroadenosine-3'-phosphate
  modified_base 15: mod_base = OTHER; note = 2'-O-methylguanosine-3'-phosphate
  modified_base 16: mod_base = OTHER; note = 2'-deoxy-2'-fluorouridine-3'-phosphate
  modified_base 17: mod_base = OTHER; note = 2'-O-methylguanosine-3'-phosphate
  modified_base 18: mod_base = OTHER; note = 2'-O-methyladenosine-3'-phosphate
  modified_base 19: mod_base = OTHER; note = 2'-O-methylcytidine-3'-phosphate
  modified_base 20: mod_base = OTHER; note = 2'-O-methyluridine-3'-phosphate
  modified_base 21: mod_base = OTHER; note = 2'-O-methyluridine-3'-phosphorothioate
  modified_base 22: mod_base = OTHER; note = 2'-O-methyluridine-3'-phosphorothioate
  modified_base 23: mod_base = OTHER; note = 2'-O-methylguanosine
agatcagttgttcagtgactttg

SEQ ID NO: 5130 - RNA, 23 nt, synthetic construct
  source 1..23: mol_type = other RNA
  modified_base 1: mod_base = OTHER; note = 2'-O-methyladenosine-3'-phosphorothioate
  modified_base 2: mod_base = OTHER; note = 2'-deoxy-2'-fluoroguanosine-3'-phosphorothioate
  modified_base 3: mod_base = OTHER; note = 2'-O-methyladenosine-3'-phosphate
  modified_base 4: mod_base = OTHER; note = 2'-O-methyluridine-3'-phosphate
  modified_base 5: mod_base = OTHER; note = 2'-O-methylguanosine-3'-phosphate
  modified_base 6: mod_base = OTHER; note = 2'-deoxy-2'-fluoroguanosine-3'-phosphate
  modified_base 7: mod_base = OTHER; note = 2'-O-methyladenosine-3'-phosphate
  modified_base 8: mod_base = OTHER; note = 2'-deoxy-2'-fluoroadenosine-3'-phosphate
  modified_base 9: mod_base = OTHER; note = 2'-deoxy-2'-fluoroadenosine-3'-phosphate
  modified_base 10: mod_base = OTHER; note = 2'-O-methyladenosine-3'-phosphate
  modified_base 11: mod_base = OTHER; note = 2'-O-methyluridine-3'-phosphate
  modified_base 12: mod_base = OTHER; note = 2'-O-methylcytidine-3'-phosphate
  modified_base 13: mod_base = OTHER; note = 2'-O-methyladenosine-3'-phosphate
  modified_base 14: mod_base = OTHER; note = 2'-deoxy-2'-fluorouridine-3'-phosphate
  modified_base 15: mod_base = OTHER; note = 2'-O-methyladenosine-3'-phosphate
  modified_base 16: mod_base = OTHER; note = 2'-deoxy-2'-fluoroadenosine-3'-phosphate
  modified_base 17: mod_base = OTHER; note = 2'-O-methylguanosine-3'-phosphate
  modified_base 18: mod_base = OTHER; note = 2'-O-methylcytidine-3'-phosphate
  modified_base 19: mod_base = OTHER; note = 2'-O-methyluridine-3'-phosphate
  modified_base 20: mod_base = OTHER; note = 2'-O-methylcytidine-3'-phosphate
  modified_base 21: mod_base = OTHER; note = 2'-O-methylcytidine-3'-phosphorothioate
  modified_base 22: mod_base = OTHER; note = 2'-O-methyladenosine-3'-phosphorothioate
  modified_base 23: mod_base = OTHER; note = 2'-O-methylguanosine
agatggaaaatcataagctccag

SEQ ID NO: 5131 - RNA, 23 nt, synthetic construct
  source 1..23: mol_type = other RNA
  modified_base 1: mod_base = OTHER; note = 2'-O-methyladenosine-3'-phosphorothioate
  modified_base 2: mod_base = OTHER; note = 2'-deoxy-2'-fluoroadenosine-3'-phosphorothioate
  modified_base 3: mod_base = OTHER; note = 2'-O-methylguanosine-3'-phosphate
  modified_base 4: mod_base = OTHER; note = 2'-O-methyluridine-3'-phosphate
  modified_base 5: mod_base = OTHER; note = 2'-O-methyluridine-3'-phosphate
  modified_base 6: mod_base = OTHER; note = 2'-deoxy-2'-fluoroguanosine-3'-phosphate
  modified_base 7: mod_base = OTHER; note = 2'-O-methylcytidine-3'-phosphate
  modified_base 8: mod_base = OTHER; note = 2'-deoxy-2'-fluoroguanosine-3'-phosphate
  modified_base 9: mod_base = OTHER; note = 2'-deoxy-2'-fluoroadenosine-3'-phosphate
  modified_base 10: mod_base = OTHER; note = 2'-O-methyladenosine-3'-phosphate
  modified_base 11: mod_base = OTHER; note = 2'-O-methyladenosine-3'-phosphate
  modified_base 12: mod_base = OTHER; note = 2'-O-methylcytidine-3'-phosphate
  modified_base 13: mod_base = OTHER; note = 2'-O-methylguanosine-3'-phosphate
  modified_base 14: mod_base = OTHER; note = 2'-deoxy-2'-fluoroadenosine-3'-phosphate
  modified_base 15: mod_base = OTHER; note = 2'-O-methyluridine-3'-phosphate
  modified_base 16: mod_base = OTHER; note = 2'-deoxy-2'-fluorocytidine-3'-phosphate
  modified_base 17: mod_base = OTHER; note = 2'-O-methylcytidine-3'-phosphate
  modified_base 18: mod_base = OTHER; note = 2'-O-methylguanosine-3'-phosphate
  modified_base 19: mod_base = OTHER; note = 2'-O-methylcytidine-3'-phosphate
  modified_base 20: mod_base = OTHER; note = 2'-O-methyladenosine-3'-phosphate
  modified_base 21: mod_base = OTHER; note = 2'-O-methylcytidine-3'-phosphorothioate
  modified_base 22: mod_base = OTHER; note = 2'-O-methyluridine-3'-phosphorothioate
  modified_base 23: mod_base = OTHER; note = 2'-O-methylguanosine
aagttgcgaaacgatccgcactg

SEQ ID NO: 5132 - RNA, 23 nt, synthetic construct
  source 1..23: mol_type = other RNA
  modified_base 1: mod_base = OTHER; note = 2'-O-methyladenosine-3'-phosphorothioate
  modified_base 2: mod_base = OTHER; note = 2'-deoxy-2'-fluoroguanosine-3'-phosphorothioate
  modified_base 3: mod_base = OTHER; note = 2'-O-methylcytidine-3'-phosphate
  modified_base 4: mod_base = OTHER; note = 2'-O-methyluridine-3'-phosphate
  modified_base 5: mod_base = OTHER; note = 2'-O-methyluridine-3'-phosphate
  modified_base 6: mod_base = OTHER; note = 2'-deoxy-2'-fluorocytidine-3'-phosphate
  modified_base 7: mod_base = OTHER; note = 2'-O-methyladenosine-3'-phosphate
  modified_base 8: mod_base = OTHER; note = 2'-deoxy-2'-fluoroadenosine-3'-phosphate
  modified_base 9: mod_base = OTHER; note = 2'-deoxy-2'-fluoroadenosine-3'-phosphate
  modified_base 10: mod_base = OTHER; note = 2'-O-methyladenosine-3'-phosphate
  modified_base 11: mod_base = OTHER; note = 2'-O-methylguanosine-3'-phosphate
  modified_base 12: mod_base = OTHER; note = 2'-O-methyladenosine-3'-phosphate
  modified_base 13: mod_base = OTHER; note = 2'-O-methylcytidine-3'-phosphate
  modified_base 14: mod_base = OTHER; note = 2'-deoxy-2'-fluoroguanosine-3'-phosphate
  modified_base 15: mod_base = OTHER; note = 2'-O-methylguanosine-3'-phosphate
  modified_base 16: mod_base = OTHER; note = 2'-deoxy-2'-fluorocytidine-3'-phosphate
  modified_base 17: mod_base = OTHER; note = 2'-O-methyladenosine-3'-phosphate
  modified_base 18: mod_base = OTHER; note = 2'-O-methylguanosine-3'-phosphate
  modified_base 19: mod_base = OTHER; note = 2'-O-methyladenosine-3'-phosphate
  modified_base 20: mod_base = OTHER; note = 2'-O-methyluridine-3'-phosphate
  modified_base 21: mod_base = OTHER; note = 2'-O-methyluridine-3'-phosphorothioate
  modified_base 22: mod_base = OTHER; note = 2'-O-methylcytidine-3'-phosphorothioate
  modified_base 23: mod_base = OTHER; note = 2'-O-methyluridine
agcttcaaaagacggcagattct

SEQ ID NO: 5133 - RNA, 23 nt, synthetic construct
  source 1..23: mol_type = other RNA
  modified_base 1: mod_base = OTHER; note = 2'-O-methyladenosine-3'-phosphorothioate
  modified_base 2: mod_base = OTHER; note = 2'-deoxy-2'-fluoroadenosine-3'-phosphorothioate
  modified_base 3: mod_base = OTHER; note = 2'-O-methylguanosine-3'-phosphate
  modified_base 4: mod_base = OTHER; note = 2'-O-methyladenosine-3'-phosphate
  modified_base 5: mod_base = OTHER; note = 2'-O-methyladenosine-3'-phosphate
  modified_base 6: mod_base = OTHER; note = 2'-deoxy-2'-fluoroguanosine-3'-phosphate
  modified_base 7: mod_base = OTHER; note = 2'-O-methyluridine-3'-phosphate
  modified_base 8: mod_base = OTHER; note = 2'-deoxy-2'-fluorocytidine-3'-phosphate
  modified_base 9: mod_base = OTHER; note = 2'-deoxy-2'-fluoroguanosine-3'-phosphate
  modified_base 10: mod_base = OTHER; note = 2'-O-methylguanosine-3'-phosphate
  modified_base 11: mod_base = OTHER; note = 2'-O-methylguanosine-3'-phosphate
  modified_base 12: mod_base = OTHER; note = 2'-O-methyladenosine-3'-phosphate
  modified_base 13: mod_base = OTHER; note = 2'-O-methyladenosine-3'-phosphate
  modified_base 14: mod_base = OTHER; note = 2'-deoxy-2'-fluoroadenosine-3'-phosphate
  modified_base 15: mod_base = OTHER; note = 2'-O-methyladenosine-3'-phosphate
  modified_base 16: mod_base = OTHER; note = 2'-deoxy-2'-fluoroguanosine-3'-phosphate
  modified_base 17: mod_base = OTHER; note = 2'-O-methyladenosine-3'-phosphate
  modified_base 18: mod_base = OTHER; note = 2'-O-methyladenosine-3'-phosphate
  modified_base 19: mod_base = OTHER; note = 2'-O-methylguanosine-3'-phosphate
  modified_base 20: mod_base = OTHER; note = 2'-O-methyluridine-3'-phosphate
  modified_base 21: mod_base = OTHER; note = 2'-O-methyladenosine-3'-phosphorothioate
  modified_base 22: mod_base = OTHER; note = 2'-O-methylguanosine-3'-phosphorothioate
  modified_base 23: mod_base = OTHER; note = 2'-O-methylguanosine
aagaagtcgggaaaagaagtagg

SEQ ID NO: 5134 - RNA, 23 nt, synthetic construct
  source 1..23: mol_type = other RNA
  modified_base 1: mod_base = OTHER; note = 2'-O-methyladenosine-3'-phosphorothioate
  modified_base 2: mod_base = OTHER; note = 2'-deoxy-2'-fluoroadenosine-3'-phosphorothioate
  modified_base 3: mod_base = OTHER; note = 2'-O-methylguanosine-3'-phosphate
  modified_base 4: mod_base = OTHER; note = 2'-O-methylguanosine-3'-phosphate
  modified_base 5: mod_base = OTHER; note = 2'-O-methylguanosine-3'-phosphate
  modified_base 6: mod_base = OTHER; note = 2'-deoxy-2'-fluorouridine-3'-phosphate
  modified_base 7: mod_base = OTHER; note = 2'-O-methyluridine-3'-phosphate
  modified_base 8: mod_base = OTHER; note = 2'-deoxy-2'-fluoroguanosine-3'-phosphate
  modified_base 9: mod_base = OTHER; note = 2'-deoxy-2'-fluorouridine-3'-phosphate
  modified_base 10: mod_base = OTHER; note = 2'-O-methylguanosine-3'-phosphate
  modified_base 11: mod_base = OTHER; note = 2'-O-methylguanosine-3'-phosphate
  modified_base 12: mod_base = OTHER; note = 2'-O-methyladenosine-3'-phosphate
  modified_base 13: mod_base = OTHER; note = 2'-O-methyluridine-3'-phosphate
  modified_base 14: mod_base = OTHER; note = 2'-deoxy-2'-fluorouridine-3'-phosphate
  modified_base 15: mod_base = OTHER; note = 2'-O-methyladenosine-3'-phosphate
  modified_base 16: mod_base = OTHER; note = 2'-deoxy-2'-fluorocytidine-3'-phosphate
  modified_base 17: mod_base = OTHER; note = 2'-O-methyladenosine-3'-phosphate
  modified_base 18: mod_base = OTHER; note = 2'-O-methylguanosine-3'-phosphate
  modified_base 19: mod_base = OTHER; note = 2'-O-methyluridine-3'-phosphate
  modified_base 20: mod_base = OTHER; note = 2'-O-methyladenosine-3'-phosphate
  modified_base 21: mod_base = OTHER; note = 2'-O-methylguanosine-3'-phosphorothioate
  modified_base 22: mod_base = OTHER; note = 2'-O-methyluridine-3'-phosphorothioate
  modified_base 23: mod_base = OTHER; note = 2'-O-methyluridine
aagggttgtggattacagtagtt

SEQ ID NO: 5135 - RNA, 23 nt, synthetic construct
  source 1..23: mol_type = other RNA
  modified_base 1: mod_base = OTHER; note = 2'-O-methyladenosine-3'-phosphorothioate
  modified_base 2: mod_base = OTHER; note = 2'-deoxy-2'-fluorouridine-3'-phosphorothioate
  modified_base 3: mod_base = OTHER; note = 2'-O-methyladenosine-3'-phosphate
  modified_base 4: mod_base = OTHER; note = 2'-O-methyladenosine-3'-phosphate
  modified_base 5: mod_base = OTHER; note = 2'-O-methylguanosine-3'-phosphate
  modified_base 6: mod_base = OTHER; note = 2'-deoxy-2'-fluoroadenosine-3'-phosphate
  modified_base 7: mod_base = OTHER; note = 2'-O-methyladenosine-3'-phosphate
  modified_base 8: mod_base = OTHER; note = 2'-deoxy-2'-fluoroadenosine-3'-phosphate
  modified_base 9: mod_base = OTHER; note = 2'-deoxy-2'-fluoroadenosine-3'-phosphate
  modified_base 10: mod_base = OTHER; note = 2'-O-methylguanosine-3'-phosphate
  modified_base 11: mod_base = OTHER; note = 2'-O-methyladenosine-3'-phosphate
  modified_base 12: mod_base = OTHER; note = 2'-O-methyladenosine-3'-phosphate
  modified_base 13: mod_base = OTHER; note = 2'-O-methyluridine-3'-phosphate
  modified_base 14: mod_base = OTHER; note = 2'-deoxy-2'-fluoroguanosine-3'-phosphate
  modified_base 15: mod_base = OTHER; note = 2'-O-methylguanosine-3'-phosphate
  modified_base 16: mod_base = OTHER; note = 2'-deoxy-2'-fluoroadenosine-3'-phosphate
  modified_base 17: mod_base = OTHER; note = 2'-O-methyladenosine-3'-phosphate
  modified_base 18: mod_base = OTHER; note = 2'-O-methylcytidine-3'-phosphate
  modified_base 19: mod_base = OTHER; note = 2'-O-methyladenosine-3'-phosphate
  modified_base 20: mod_base = OTHER; note = 2'-O-methyladenosine-3'-phosphate
  modified_base 21: mod_base = OTHER; note = 2'-O-methyladenosine-3'-phosphorothioate
  modified_base 22: mod_base = OTHER; note = 2'-O-methyladenosine-3'-phosphorothioate
  modified_base 23: mod_base = OTHER; note = 2'-O-methylguanosine
ataagaaaagaatggaacaaaag

SEQ ID NO: 5136 - RNA, 23 nt, synthetic construct
  source 1..23: mol_type = other RNA
  modified_base 1: mod_base = OTHER; note = 2'-O-methyladenosine-3'-phosphorothioate
  modified_base 2: mod_base = OTHER; note = 2'-deoxy-2'-fluorouridine-3'-phosphorothioate
  modified_base 3: mod_base = OTHER; note = 2'-O-methyluridine-3'-phosphate
  modified_base 4: mod_base = OTHER; note = 2'-O-methyluridine-3'-phosphate
  modified_base 5: mod_base = OTHER; note = 2'-O-methylcytidine-3'-phosphate
  modified_base 6: mod_base = OTHER; note = 2'-deoxy-2'-fluoroguanosine-3'-phosphate
  modified_base 7: mod_base = OTHER; note = 2'-O-methyluridine-3'-phosphate
  modified_base 8: mod_base = OTHER; note = 2'-deoxy-2'-fluoroguanosine-3'-phosphate
  modified_base 9: mod_base = OTHER; note = 2'-deoxy-2'-fluorocytidine-3'-phosphate
  modified_base 10: mod_base = OTHER; note = 2'-O-methyluridine-3'-phosphate
  modified_base 11: mod_base = OTHER; note = 2'-O-methyluridine-3'-phosphate
  modified_base 12: mod_base = OTHER; note = 2'-O-methyluridine-3'-phosphate
  modified_base 13: mod_base = OTHER; note = 2'-O-methylcytidine-3'-phosphate
  modified_base 14: mod_base = OTHER; note = 2'-deoxy-2'-fluoroadenosine-3'-phosphate
  modified_base 15: mod_base = OTHER; note = 2'-O-methylcytidine-3'-phosphate
  modified_base 16: mod_base = OTHER; note = 2'-deoxy-2'-fluoroadenosine-3'-phosphate
  modified_base 17: mod_base = OTHER; note = 2'-O-methyluridine-3'-phosphate
  modified_base 18: mod_base = OTHER; note = 2'-O-methylcytidine-3'-phosphate
  modified_base 19: mod_base = OTHER; note = 2'-O-methyluridine-3'-phosphate
  modified_base 20: mod_base = OTHER; note = 2'-O-methyluridine-3'-phosphate
  modified_base 21: mod_base = OTHER; note = 2'-O-methylcytidine-3'-phosphorothioate
  modified_base 22: mod_base = OTHER; note = 2'-O-methyladenosine-3'-phosphorothioate
  modified_base 23: mod_base = OTHER; note = 2'-O-methyluridine
atttcgtgctttcacatcttcat

SEQ ID NO: 5137 - RNA, 23 nt, synthetic construct
  source 1..23: mol_type = other RNA
  modified_base 1: mod_base = OTHER; note = 2'-O-methyladenosine-3'-phosphorothioate
  modified_base 2: mod_base = OTHER; note = 2'-deoxy-2'-fluoroadenosine-3'-phosphorothioate
  modified_base 3: mod_base = OTHER; note = 2'-O-methyluridine-3'-phosphate
  modified_base 4: mod_base = OTHER; note = 2'-O-methylguanosine-3'-phosphate
  modified_base 5: mod_base = OTHER; note = 2'-O-methylguanosine-3'-phosphate
  modified_base 6: mod_base = OTHER; note = 2'-deoxy-2'-fluorocytidine-3'-phosphate
  modified_base 7: mod_base = OTHER; note = 2'-O-methyluridine-3'-phosphate
  modified_base 8: mod_base = OTHER; note = 2'-deoxy-2'-fluorocytidine-3'-phosphate
  modified_base 9: mod_base = OTHER; note = 2'-deoxy-2'-fluoroadenosine-3'-phosphate
  modified_base 10: mod_base = OTHER; note = 2'-O-methyladenosine-3'-phosphate
  modified_base 11: mod_base = OTHER; note = 2'-O-methyluridine-3'-phosphate
  modified_base 12: mod_base = OTHER; note = 2'-O-methyladenosine-3'-phosphate
  modified_base 13: mod_base = OTHER; note = 2'-O-methyluridine-3'-phosphate
  modified_base 14: mod_base = OTHER; note = 2'-deoxy-2'-fluoroadenosine-3'-phosphate
  modified_base 15: mod_base = OTHER; note = 2'-O-methyluridine-3'-phosphate
  modified_base 16: mod_base = OTHER; note = 2'-deoxy-2'-fluorouridine-3'-phosphate
  modified_base 17: mod_base = OTHER; note = 2'-O-methyluridine-3'-phosphate
  modified_base 18: mod_base = OTHER; note = 2'-O-methyladenosine-3'-phosphate
  modified_base 19: mod_base = OTHER; note = 2'-O-methylcytidine-3'-phosphate
  modified_base 20: mod_base = OTHER; note = 2'-O-methyluridine-3'-phosphate
  modified_base 21: mod_base = OTHER; note = 2'-O-methylguanosine-3'-phosphorothioate
  modified_base 22: mod_base = OTHER; note = 2'-O-methyluridine-3'-phosphorothioate
  modified_base 23: mod_base = OTHER; note = 2'-O-methyladenosine
aatggctcaatatatttactgta

SEQ ID NO: 5138 - RNA, 23 nt, synthetic construct
  source 1..23: mol_type = other RNA
  modified_base 1: mod_base = OTHER; note = 2'-O-methyladenosine-3'-phosphorothioate
  modified_base 2: mod_base = OTHER; note = 2'-deoxy-2'-fluoroguanosine-3'-phosphorothioate
  modified_base 3: mod_base = OTHER; note = 2'-O-methyladenosine-3'-phosphate
  modified_base 4: mod_base = OTHER; note = 2'-O-methylguanosine-3'-phosphate
  modified_base 5: mod_base = OTHER; note = 2'-O-methyladenosine-3'-phosphate
  modified_base 6: mod_base = OTHER; note = 2'-deoxy-2'-fluoroadenosine-3'-phosphate
  modified_base 7: mod_base = OTHER; note = 2'-O-methylguanosine-3'-phosphate
  modified_base 8: mod_base = OTHER; note = 2'-deoxy-2'-fluorouridine-3'-phosphate
  modified_base 9: mod_base = OTHER; note = 2'-deoxy-2'-fluorouridine-3'-phosphate
  modified_base 10: mod_base = OTHER; note = 2'-O-methyluridine-3'-phosphate
  modified_base 11: mod_base = OTHER; note = 2'-O-methyluridine-3'-phosphate
  modified_base 12: mod_base = OTHER; note = 2'-O-methylcytidine-3'-phosphate
  modified_base 13: mod_base = OTHER; note = 2'-O-methyluridine-3'-phosphate
  modified_base 14: mod_base = OTHER; note = 2'-deoxy-2'-fluorouridine-3'-phosphate
  modified_base 15: mod_base = OTHER; note = 2'-O-methyluridine-3'-phosphate
  modified_base 16: mod_base = OTHER; note = 2'-deoxy-2'-fluorocytidine-3'-phosphate
  modified_base 17: mod_base = OTHER; note = 2'-O-methylcytidine-3'-phosphate
  modified_base 18: mod_base = OTHER; note = 2'-O-methylcytidine-3'-phosphate
  modified_base 19: mod_base = OTHER; note = 2'-O-methyladenosine-3'-phosphate
  modified_base 20: mod_base = OTHER; note = 2'-O-methyluridine-3'-phosphate
  modified_base 21: mod_base = OTHER; note = 2'-O-methyluridine-3'-phosphorothioate
  modified_base 22: mod_base = OTHER; note = 2'-O-methyluridine-3'-phosphorothioate
  modified_base 23: mod_base = OTHER; note = 2'-O-methylguanosine
agagaagttttctttcccatttg

SEQ ID NO: 5139 - RNA, 23 nt, synthetic construct
  source 1..23: mol_type = other RNA
  modified_base 1: mod_base = OTHER; note = 2'-O-methyladenosine-3'-phosphorothioate
  modified_base 2: mod_base = OTHER; note = 2'-deoxy-2'-fluoroadenosine-3'-phosphorothioate
  modified_base 3: mod_base = OTHER; note = 2'-O-methyluridine-3'-phosphate
  modified_base 4: mod_base = OTHER; note = 2'-O-methylguanosine-3'-phosphate
  modified_base 5: mod_base = OTHER; note = 2'-O-methyladenosine-3'-phosphate
  modified_base 6: mod_base = OTHER; note = 2'-deoxy-2'-fluoroadenosine-3'-phosphate
  modified_base 7: mod_base = OTHER; note = 2'-O-methyladenosine-3'-phosphate
  modified_base 8: mod_base = OTHER; note = 2'-deoxy-2'-fluoroadenosine-3'-phosphate
  modified_base 9: mod_base = OTHER; note = 2'-deoxy-2'-fluorouridine-3'-phosphate
  modified_base 10: mod_base = OTHER; note = 2'-O-methylguanosine-3'-phosphate
  modified_base 11: mod_base = OTHER; note = 2'-O-methyladenosine-3'-phosphate
  modified_base 12: mod_base = OTHER; note = 2'-O-methyladenosine-3'-phosphate
  modified_base 13: mod_base = OTHER; note = 2'-O-methylcytidine-3'-phosphate
  modified_base 14: mod_base = OTHER; note = 2'-deoxy-2'-fluoroadenosine-3'-phosphate
  modified_base 15: mod_base = OTHER; note = 2'-O-methyluridine-3'-phosphate
  modified_base 16: mod_base = OTHER; note = 2'-deoxy-2'-fluorouridine-3'-phosphate
  modified_base 17: mod_base = OTHER; note = 2'-O-methylcytidine-3'-phosphate
  modified_base 18: mod_base = OTHER; note = 2'-O-methyluridine-3'-phosphate
  modified_base 19: mod_base = OTHER; note = 2'-O-methylguanosine-3'-phosphate
  modified_base 20: mod_base = OTHER; note = 2'-O-methylcytidine-3'-phosphate
  modified_base 21: mod_base = OTHER; note = 2'-O-methylcytidine-3'-phosphorothioate
  modified_base 22: mod_base = OTHER; note = 2'-O-methyladenosine-3'-phosphorothioate
  modified_base 23: mod_base = OTHER; note = 2'-O-methylcytidine
aatgaaaatgaacattctgccac

SEQ ID NO: 5140 - RNA, 23 nt, synthetic construct
  source 1..23: mol_type = other RNA
  modified_base 1: mod_base = OTHER; note = 2'-O-methyladenosine-3'-phosphorothioate
  modified_base 2: mod_base = OTHER; note = 2'-deoxy-2'-fluorouridine-3'-phosphorothioate
  modified_base 3: mod_base = OTHER; note = 2'-O-methyladenosine-3'-phosphate
  modified_base 4: mod_base = OTHER; note = 2'-O-methyladenosine-3'-phosphate
  modified_base 5: mod_base = OTHER; note = 2'-O-methyluridine-3'-phosphate
  modified_base 6: mod_base = OTHER; note = 2'-deoxy-2'-fluoroadenosine-3'-phosphate
  modified_base 7: mod_base = OTHER; note = 2'-O-methyluridine-3'-phosphate
  modified_base 8: mod_base = OTHER; note = 2'-deoxy-2'-fluoroadenosine-3'-phosphate
  modified_base 9: mod_base = OTHER; note = 2'-deoxy-2'-fluorouridine-3'-phosphate
  modified_base 10: mod_base = OTHER; note = 2'-O-methylguanosine-3'-phosphate
  modified_base 11: mod_base = OTHER; note = 2'-O-methylcytidine-3'-phosphate
  modified_base 12: mod_base = OTHER; note = 2'-O-methyluridine-3'-phosphate
  modified_base 13: mod_base = OTHER; note = 2'-O-methyladenosine-3'-phosphate
  modified_base 14: mod_base = OTHER; note = 2'-deoxy-2'-fluorouridine-3'-phosphate
  modified_base 15: mod_base = OTHER; note = 2'-O-methylguanosine-3'-phosphate
  modified_base 16: mod_base = OTHER; note = 2'-deoxy-2'-fluorocytidine-3'-phosphate
  modified_base 17: mod_base = OTHER; note = 2'-O-methyladenosine-3'-phosphate
  modified_base 18: mod_base = OTHER; note = 2'-O-methylguanosine-3'-phosphate
  modified_base 19: mod_base = OTHER; note = 2'-O-methylguanosine-3'-phosphate
  modified_base 20: mod_base = OTHER; note = 2'-O-methylcytidine-3'-phosphate
  modified_base 21: mod_base = OTHER; note = 2'-O-methylguanosine-3'-phosphorothioate
  modified_base 22: mod_base = OTHER; note = 2'-O-methylguanosine-3'-phosphorothioate
  modified_base 23: mod_base = OTHER; note = 2'-O-methylcytidine
ataatatatgctatgcaggcggc

SEQ ID NO: 5141 - RNA, 23 nt, synthetic construct
  source 1..23: mol_type = other RNA
  modified_base 1: mod_base = OTHER; note = 2'-O-methyladenosine-3'-phosphorothioate
  modified_base 2: mod_base = OTHER; note = 2'-deoxy-2'-fluoroguanosine-3'-phosphorothioate
  modified_base 3: mod_base = OTHER; note = 2'-O-methylguanosine-3'-phosphate
  modified_base 4: mod_base = OTHER; note = 2'-O-methyladenosine-3'-phosphate
  modified_base 5: mod_base = OTHER; note = 2'-O-methyladenosine-3'-phosphate
  modified_base 6: mod_base = OTHER; note = 2'-deoxy-2'-fluoroadenosine-3'-phosphate
  modified_base 7: mod_base = OTHER; note = 2'-O-methyluridine-3'-phosphate
  modified_base 8: mod_base = OTHER; note = 2'-deoxy-2'-fluoroguanosine-3'-phosphate
  modified_base 9: mod_base = OTHER; note = 2'-deoxy-2'-fluoroguanosine-3'-phosphate
  modified_base 10: mod_base = OTHER; note = 2'-O-methyladenosine-3'-phosphate
  modified_base 11: mod_base = OTHER; note = 2'-O-methyladenosine-3'-phosphate
  modified_base 12: mod_base = OTHER; note = 2'-O-methyladenosine-3'-phosphate
  modified_base 13: mod_base = OTHER; note = 2'-O-methyladenosine-3'-phosphate
  modified_base 14: mod_base = OTHER; note = 2'-deoxy-2'-fluoroadenosine-3'-phosphate
  modified_base 15: mod_base = OTHER; note = 2'-O-methylcytidine-3'-phosphate
  modified_base 16: mod_base = OTHER; note = 2'-deoxy-2'-fluoroadenosine-3'-phosphate
  modified_base 17: mod_base = OTHER; note = 2'-O-methylguanosine-3'-phosphate
  modified_base 18: mod_base = OTHER; note = 2'-O-methylcytidine-3'-phosphate
  modified_base 19: mod_base = OTHER; note = 2'-O-methylcytidine-3'-phosphate
  modified_base 20: mod_base = OTHER; note = 2'-O-methyladenosine-3'-phosphate
  modified_base 21: mod_base = OTHER; note = 2'-O-methylguanosine-3'-phosphorothioate
  modified_base 22: mod_base = OTHER; note = 2'-O-methylguanosine-3'-phosphorothioate
  modified_base 23: mod_base = OTHER; note = 2'-O-methylcytidine
aggaaatggaaaaacagccaggc

SEQ ID NO: 5142 - RNA, 23 nt, synthetic construct
  source 1..23: mol_type = other RNA
  modified_base 1: mod_base = OTHER; note = 2'-O-methyladenosine-3'-phosphorothioate
  modified_base 2: mod_base = OTHER; note = 2'-deoxy-2'-fluorocytidine-3'-phosphorothioate
  modified_base 3: mod_base = OTHER; note = 2'-O-methyladenosine-3'-phosphate
  modified_base 4: mod_base = OTHER; note = 2'-O-methyladenosine-3'-phosphate
  modified_base 5: mod_base = OTHER; note = 2'-O-methyladenosine-3'-phosphate
  modified_base 6: mod_base = OTHER; note = 2'-deoxy-2'-fluoroadenosine-3'-phosphate
  modified_base 7: mod_base = OTHER; note = 2'-O-methylguanosine-3'-phosphate
  modified_base 8: mod_base = OTHER; note = 2'-deoxy-2'-fluoroadenosine-3'-phosphate
  modified_base 9: mod_base = OTHER; note = 2'-deoxy-2'-fluorocytidine-3'-phosphate
  modified_base 10: mod_base = OTHER; note = 2'-O-methyluridine-3'-phosphate
  modified_base 11: mod_base = OTHER; note = 2'-O-methyluridine-3'-phosphate
  modified_base 12: mod_base = OTHER; note = 2'-O-methyluridine-3'-phosphate
  modified_base 13: mod_base = OTHER; note = 2'-O-methyluridine-3'-phosphate
  modified_base 14: mod_base = OTHER; note = 2'-deoxy-2'-fluoroadenosine-3'-phosphate
  modified_base 15: mod_base = OTHER; note = 2'-O-methyluridine-3'-phosphate
  modified_base 16: mod_base = OTHER; note = 2'-deoxy-2'-fluorouridine-3'-phosphate
  modified_base 17: mod_base = OTHER; note = 2'-O-methyluridine-3'-phosphate
  modified_base 18: mod_base = OTHER; note = 2'-O-methylcytidine-3'-phosphate
  modified_base 19: mod_base = OTHER; note = 2'-O-methylcytidine-3'-phosphate
  modified_base 20: mod_base = OTHER; note = 2'-O-methylcytidine-3'-phosphate
  modified_base 21: mod_base = OTHER; note = 2'-O-methyluridine-3'-phosphorothioate
  modified_base 22: mod_base = OTHER; note = 2'-O-methyluridine-3'-phosphorothioate
  modified_base 23: mod_base = OTHER; note = 2'-O-methyluridine
acaaaagacttttatttcccttt

SEQ ID NO: 5143 - RNA, 23 nt, synthetic construct
  source 1..23: mol_type = other RNA
  modified_base 1: mod_base = OTHER; note = 2'-O-methyladenosine-3'-phosphorothioate
  modified_base 2: mod_base = OTHER; note = 2'-deoxy-2'-fluoroguanosine-3'-phosphorothioate
  modified_base 3: mod_base = OTHER; note = 2'-O-methyladenosine-3'-phosphate
  modified_base 4: mod_base = OTHER; note = 2'-O-methylguanosine-3'-phosphate
  modified_base 5: mod_base = OTHER; note = 2'-O-methyladenosine-3'-phosphate
  modified_base 6: mod_base = OTHER; note = 2'-deoxy-2'-fluorouridine-3'-phosphate
  modified_base 7: mod_base = OTHER; note = 2'-O-methylguanosine-3'-phosphate
  modified_base 8: mod_base = OTHER; note = 2'-deoxy-2'-fluoroadenosine-3'-phosphate
  modified_base 9: mod_base = OTHER; note = 2'-deoxy-2'-fluorocytidine-3'-phosphate
  modified_base 10: mod_base = OTHER; note = 2'-O-methylcytidine-3'-phosphate
  modified_base 11: mod_base = OTHER; note = 2'-O-methyladenosine-3'-phosphate
  modified_base 12: mod_base = OTHER; note = 2'-O-methylguanosine-3'-phosphate
  modified_base 13: mod_base = OTHER; note = 2'-O-methyladenosine-3'-phosphate
  modified_base 14: mod_base = OTHER; note = 2'-deoxy-2'-fluoroadenosine-3'-phosphate
  modified_base 15: mod_base = OTHER; note = 2'-O-methyladenosine-3'-phosphate
  modified_base 16: mod_base = OTHER; note = 2'-deoxy-2'-fluoroguanosine-3'-phosphate
  modified_base 17: mod_base = OTHER; note = 2'-O-methylguanosine-3'-phosphate
  modified_base 18: mod_base = OTHER; note = 2'-O-methylguanosine-3'-phosphate
  modified_base 19: mod_base = OTHER; note = 2'-O-methyluridine-3'-phosphate
  modified_base 20: mod_base = OTHER; note = 2'-O-methylguanosine-3'-phosphate
  modified_base 21: mod_base = OTHER; note = 2'-O-methylguanosine-3'-phosphorothioate
  modified_base 22: mod_base = OTHER; note = 2'-O-methylcytidine-3'-phosphorothioate
  modified_base 23: mod_base = OTHER; note = 2'-O-methylguanosine
agagatgaccagaaagggtggcg

SEQ ID NO: 5144 - RNA, 23 nt, synthetic construct
  source 1..23: mol_type = other RNA
  modified_base 1: mod_base = OTHER; note = 2'-O-methyladenosine-3'-phosphorothioate
  modified_base 2: mod_base = OTHER; note = 2'-deoxy-2'-fluoroadenosine-3'-phosphorothioate
  modified_base 3: mod_base = OTHER; note = 2'-O-methylguanosine-3'-phosphate
  modified_base 4: mod_base = OTHER; note = 2'-O-methyluridine-3'-phosphate
  modified_base 5: mod_base = OTHER; note = 2'-O-methylcytidine-3'-phosphate
  modified_base 6: mod_base = OTHER; note = 2'-deoxy-2'-fluorocytidine-3'-phosphate
  modified_base 7: mod_base = OTHER; note = 2'-O-methyluridine-3'-phosphate
  modified_base 8: mod_base = OTHER; note = 2'-deoxy-2'-fluorouridine-3'-phosphate
  modified_base 9: mod_base = OTHER; note = 2'-deoxy-2'-fluorouridine-3'-phosphate
  modified_base 10: mod_base = OTHER; note = 2'-O-methyladenosine-3'-phosphate
  modified_base 11: mod_base = OTHER; note = 2'-O-methylcytidine-3'-phosphate
  modified_base 12: mod_base = OTHER; note = 2'-O-methylcytidine-3'-phosphate
  modified_base 13: mod_base = OTHER; note = 2'-O-methyladenosine-3'-phosphate
  modified_base 14: mod_base = OTHER; note = 2'-deoxy-2'-fluorouridine-3'-phosphate
  modified_base 15: mod_base = OTHER; note = 2'-O-methyluridine-3'-phosphate
  modified_base 16: mod_base = OTHER; note = 2'-deoxy-2'-fluoroadenosine-3'-phosphate
  modified_base 17: mod_base = OTHER; note = 2'-O-methyluridine-3'-phosphate
  modified_base 18: mod_base = OTHER; note = 2'-O-methylguanosine-3'-phosphate
  modified_base 19: mod_base = OTHER; note = 2'-O-methylguanosine-3'-phosphate
  modified_base 20: mod_base = OTHER; note = 2'-O-methylcytidine-3'-phosphate
  modified_base 21: mod_base = OTHER; note = 2'-O-methyladenosine-3'-phosphorothioate
  modified_base 22: mod_base = OTHER; note = 2'-O-methyladenosine-3'-phosphorothioate
  modified_base 23: mod_base = OTHER; note = 2'-O-methylguanosine
aagtcctttaccattatggcaag

SEQ ID NO: 5145 - RNA, 23 nt, synthetic construct
  source 1..23: mol_type = other RNA
  modified_base 1: mod_base = OTHER; note = 2'-O-methyladenosine-3'-phosphorothioate
  modified_base 2: mod_base = OTHER; note = 2'-deoxy-2'-fluorouridine-3'-phosphorothioate
  modified_base 3: mod_base = OTHER; note = 2'-O-methyluridine-3'-phosphate
  modified_base 4: mod_base = OTHER; note = 2'-O-methyluridine-3'-phosphate
  modified_base 5: mod_base = OTHER; note = 2'-O-methylcytidine-3'-phosphate
  modified_base 6: mod_base = OTHER; note = 2'-deoxy-2'-fluorocytidine-3'-phosphate
  modified_base 7: mod_base = OTHER; note = 2'-O-methyladenosine-3'-phosphate
  modified_base 8: mod_base = OTHER; note = 2'-deoxy-2'-fluoroguanosine-3'-phosphate
  modified_base 9: mod_base = OTHER; note = 2'-deoxy-2'-fluorouridine-3'-phosphate
  modified_base 10: mod_base = OTHER; note = 2'-O-methyluridine-3'-phosphate
  modified_base 11: mod_base = OTHER; note = 2'-O-methyluridine-3'-phosphate
  modified_base 12: mod_base = OTHER; note = 2'-O-methyladenosine-3'-phosphate
  modified_base 13: mod_base = OTHER; note = 2'-O-methylcytidine-3'-phosphate
  modified_base 14: mod_base = OTHER; note = 2'-deoxy-2'-fluoroadenosine-3'-phosphate
  modified_base 15: mod_base = OTHER; note = 2'-O-methylcytidine-3'-phosphate
  modified_base 16: mod_base = OTHER; note = 2'-deoxy-2'-fluoroadenosine-3'-phosphate
  modified_base 17: mod_base = OTHER; note = 2'-O-methylguanosine-3'-phosphate
  modified_base 18: mod_base = OTHER; note = 2'-O-methyluridine-3'-phosphate
  modified_base 19: mod_base = OTHER; note = 2'-O-methyluridine-3'-phosphate
  modified_base 20: mod_base = OTHER; note = 2'-O-methyluridine-3'-phosphate
  modified_base 21: mod_base = OTHER; note = 2'-O-methylguanosine-3'-phosphorothioate
  modified_base 22: mod_base = OTHER; note = 2'-O-methyladenosine-3'-phosphorothioate
  modified_base 23: mod_base = OTHER; note = 2'-O-methylcytidine
atttccagtttacacagtttgac

SEQ ID NO: 5146 - RNA, 23 nt, synthetic construct
  source 1..23: mol_type = other RNA
  modified_base 1: mod_base = OTHER; note = 2'-O-methyladenosine-3'-phosphorothioate
  modified_base 2: mod_base = OTHER; note = 2'-deoxy-2'-fluorocytidine-3'-phosphorothioate
  modified_base 3: mod_base = OTHER; note = 2'-O-methyladenosine-3'-phosphate
  modified_base 4: mod_base = OTHER; note = 2'-O-methylguanosine-3'-phosphate
  modified_base 5: mod_base = OTHER; note = 2'-O-methyladenosine-3'-phosphate
  modified_base 6: mod_base = OTHER; note = 2'-deoxy-2'-fluorouridine-3'-phosphate
  modified_base 7: mod_base = OTHER; note = 2'-O-methylguanosine-3'-phosphate
  modified_base 8: mod_base = OTHER; note = 2'-deoxy-2'-fluorouridine-3'-phosphate
  modified_base 9: mod_base = OTHER; note = 2'-deoxy-2'-fluoroadenosine-3'-phosphate
  modified_base 10: mod_base = OTHER; note = 2'-O-methylcytidine-3'-phosphate
  modified_base 11: mod_base = OTHER; note = 2'-O-methyladenosine-3'-phosphate
  modified_base 12: mod_base = OTHER; note = 2'-O-methyluridine-3'-phosphate
  modified_base 13: mod_base = OTHER; note = 2'-O-methylguanosine-3'-phosphate
  modified_base 14: mod_base = OTHER; note = 2'-deoxy-2'-fluoroadenosine-3'-phosphate
  modified_base 15: mod_base = OTHER; note = 2'-O-methylguanosine-3'-phosphate
  modified_base 16: mod_base = OTHER; note = 2'-deoxy-2'-fluoroguanosine-3'-phosphate
  modified_base 17: mod_base = OTHER; note = 2'-O-methylguanosine-3'-phosphate
  modified_base 18: mod_base = OTHER; note = 2'-O-methyluridine-3'-phosphate
  modified_base 19: mod_base = OTHER; note = 2'-O-methyluridine-3'-phosphate
  modified_base 20: mod_base = OTHER; note = 2'-O-methyluridine-3'-phosphate
  modified_base 21: mod_base = OTHER; note = 2'-O-methyladenosine-3'-phosphorothioate
  modified_base 22: mod_base = OTHER; note = 2'-O-methylguanosine-3'-phosphorothioate
  modified_base 23: mod_base = OTHER; note = 2'-O-methyladenosine
acagatgtacatgagggtttaga

SEQ ID NO: 5147 - RNA, 23 nt, synthetic construct
  source 1..23: mol_type = other RNA
  modified_base 1: mod_base = OTHER; note = 2'-O-methyladenosine-3'-phosphorothioate
  modified_base 2: mod_base = OTHER; note = 2'-deoxy-2'-fluorocytidine-3'-phosphorothioate
  modified_base 3: mod_base = OTHER; note = 2'-O-methylguanosine-3'-phosphate
  modified_base 4: mod_base = OTHER; note = 2'-O-methyluridine-3'-phosphate
  modified_base 5: mod_base = OTHER; note = 2'-O-methyladenosine-3'-phosphate
  modified_base 6: mod_base = OTHER; note = 2'-deoxy-2'-fluorouridine-3'-phosphate
  modified_base 7: mod_base = OTHER; note = 2'-O-methyladenosine-3'-phosphate
  modified_base 8: mod_base = OTHER; note = 2'-deoxy-2'-fluoroguanosine-3'-phosphate
  modified_base 9: mod_base = OTHER; note = 2'-deoxy-2'-fluorocytidine-3'-phosphate
  modified_base 10: mod_base = OTHER; note = 2'-O-methyluridine-3'-phosphate
  modified_base 11: mod_base = OTHER; note = 2'-O-methylguanosine-3'-phosphate
  modified_base 12: mod_base = OTHER; note = 2'-O-methylcytidine-3'-phosphate
  modified_base 13: mod_base = OTHER; note = 2'-O-methyluridine-3'-phosphate
  modified_base 14: mod_base = OTHER; note = 2'-deoxy-2'-fluorouridine-3'-phosphate
  modified_base 15: mod_base = OTHER; note = 2'-O-methylcytidine-3'-phosphate
  modified_base 16: mod_base = OTHER; note = 2'-deoxy-2'-fluoroadenosine-3'-phosphate
  modified_base 17: mod_base = OTHER; note = 2'-O-methylcytidine-3'-phosphate
  modified_base 18: mod_base = OTHER; note = 2'-O-methyladenosine-3'-phosphate
  modified_base 19: mod_base = OTHER; note = 2'-O-methyladenosine-3'-phosphate
  modified_base 20: mod_base = OTHER; note = 2'-O-methyladenosine-3'-phosphate
  modified_base 21: mod_base = OTHER; note = 2'-O-methyladenosine-3'-phosphorothioate
  modified_base 22: mod_base = OTHER; note = 2'-O-methylguanosine-3'-phosphorothioate
  modified_base 23: mod_base = OTHER; note = 2'-O-methylguanosine
acgtatagctgcttcacaaaagg

SEQ ID NO: 5148 - RNA, 23 nt, synthetic construct
  source 1..23: mol_type = other RNA
  modified_base 1: mod_base = OTHER; note = 2'-O-methyladenosine-3'-phosphorothioate
  modified_base 2: mod_base = OTHER; note = 2'-deoxy-2'-fluorouridine-3'-phosphorothioate
  modified_base 3: mod_base = OTHER; note = 2'-O-methyluridine-3'-phosphate
  modified_base 4: mod_base = OTHER; note = 2'-O-methyluridine-3'-phosphate
  modified_base 5: mod_base = OTHER; note = 2'-O-methyladenosine-3'-phosphate
  modified_base 6: mod_base = OTHER; note = 2'-deoxy-2'-fluorouridine-3'-phosphate
  modified_base 7: mod_base = OTHER; note = 2'-O-methylcytidine-3'-phosphate
  modified_base 8: mod_base = OTHER; note = 2'-deoxy-2'-fluoroadenosine-3'-phosphate
  modified_base 9: mod_base = OTHER; note = 2'-deoxy-2'-fluoroadenosine-3'-phosphate
  modified_base 10: mod_base = OTHER; note = 2'-O-methyluridine-3'-phosphate
  modified_base 11: mod_base = OTHER; note = 2'-O-methylguanosine-3'-phosphate
  modified_base 12: mod_base = OTHER; note = 2'-O-methyladenosine-3'-phosphate
  modified_base 13: mod_base = OTHER; note = 2'-O-methyluridine-3'-phosphate
  modified_base 14: mod_base = OTHER; note = 2'-deoxy-2'-fluoroadenosine-3'-phosphate
  modified_base 15: mod_base = OTHER; note = 2'-O-methyluridine-3'-phosphate
  modified_base 16: mod_base = OTHER; note = 2'-deoxy-2'-fluorocytidine-3'-phosphate
  modified_base 17: mod_base = OTHER; note = 2'-O-methyluridine-3'-phosphate
  modified_base 18: mod_base = OTHER; note = 2'-O-methylcytidine-3'-phosphate
  modified_base 19: mod_base = OTHER; note = 2'-O-methylcytidine-3'-phosphate
  modified_base 20: mod_base = OTHER; note = 2'-O-methyladenosine-3'-phosphate
  modified_base 21: mod_base = OTHER; note = 2'-O-methyluridine-3'-phosphorothioate
  modified_base 22: mod_base = OTHER; note = 2'-O-methyluridine-3'-phosphorothioate
  modified_base 23: mod_base = OTHER; note = 2'-O-methylcytidine
atttatcaatgatatctccattc

SEQ ID NO: 5149 - RNA, 23 nt, synthetic construct
  source 1..23: mol_type = other RNA
  modified_base 1: mod_base = OTHER; note = 2'-O-methyladenosine-3'-phosphorothioate
  modified_base 2: mod_base = OTHER; note = 2'-deoxy-2'-fluoroguanosine-3'-phosphorothioate
  modified_base 3: mod_base = OTHER; note = 2'-O-methyladenosine-3'-phosphate
  modified_base 4: mod_base = OTHER; note = 2'-O-methyladenosine-3'-phosphate
  modified_base 5: mod_base = OTHER; note = 2'-O-methyluridine-3'-phosphate
  modified_base 6: mod_base = OTHER; note = 2'-deoxy-2'-fluoroguanosine-3'-phosphate
  modified_base 7: mod_base = OTHER; note = 2'-O-methylcytidine-3'-phosphate
  modified_base 8: mod_base = OTHER; note = 2'-deoxy-2'-fluoroadenosine-3'-phosphate
  modified_base 9: mod_base = OTHER; note = 2'-deoxy-2'-fluoroadenosine-3'-phosphate
  modified_base 10: mod_base = OTHER; note = 2'-O-methyluridine-3'-phosphate
  modified_base 11: mod_base = OTHER; note = 2'-O-methylguanosine-3'-phosphate
  modified_base 12: mod_base = OTHER; note = 2'-O-methyladenosine-3'-phosphate
  modified_base 13: mod_base = OTHER; note = 2'-O-methyluridine-3'-phosphate
  modified_base 14: mod_base = OTHER; note = 2'-deoxy-2'-fluoroguanosine-3'-phosphate
  modified_base 15: mod_base = OTHER; note = 2'-O-methyladenosine-3'-phosphate
  modified_base 16: mod_base = OTHER; note = 2'-deoxy-2'-fluoroadenosine-3'-phosphate
  modified_base 17: mod_base = OTHER; note = 2'-O-methyluridine-3'-phosphate
  modified_base 18: mod_base = OTHER; note = 2'-O-methyladenosine-3'-phosphate
  modified_base 19: mod_base = OTHER; note = 2'-O-methylcytidine-3'-phosphate
  modified_base 20: mod_base = OTHER; note = 2'-O-methyladenosine-3'-phosphate
  modified_base 21: mod_base = OTHER; note = 2'-O-methylcytidine-3'-phosphorothioate
  modified_base 22: mod_base = OTHER; note = 2'-O-methyladenosine-3'-phosphorothioate
  modified_base 23: mod_base = OTHER; note = 2'-O-methylguanosine
agaatgcaatgatgaatacacag

SEQ ID NO: 5150 - RNA, 23 nt, synthetic construct
  source 1..23: mol_type = other RNA
  modified_base 1: mod_base = OTHER; note = 2'-O-methyladenosine-3'-phosphorothioate
  modified_base 2: mod_base = OTHER; note = 2'-deoxy-2'-fluoroadenosine-3'-phosphorothioate
  modified_base 3: mod_base = OTHER; note = 2'-O-methylcytidine-3'-phosphate
  modified_base 4: mod_base = OTHER; note = 2'-O-methyluridine-3'-phosphate
  modified_base 5: mod_base = OTHER; note = 2'-O-methyladenosine-3'-phosphate
  modified_base 6: mod_base = OTHER; note = 2'-deoxy-2'-fluoroadenosine-3'-phosphate
  modified_base 7: mod_base = OTHER; note = 2'-O-methyladenosine-3'-phosphate
  modified_base 8: mod_base = OTHER; note = 2'-deoxy-2'-fluorouridine-3'-phosphate
  modified_base 9: mod_base = OTHER; note = 2'-deoxy-2'-fluorouridine-3'-phosphate
  modified_base 10: mod_base = OTHER; note = 2'-O-methyladenosine-3'-phosphate
  modified_base 11: mod_base = OTHER; note = 2'-O-methylcytidine-3'-phosphate
  modified_base 12: mod_base = OTHER; note = 2'-O-methylcytidine-3'-phosphate
  modified_base 13: mod_base = OTHER; note = 2'-O-methylcytidine-3'-phosphate
  modified_base 14: mod_base = OTHER; note = 2'-deoxy-2'-fluoroadenosine-3'-phosphate
  modified_base 15: mod_base = OTHER; note = 2'-O-methyladenosine-3'-phosphate
  modified_base 16: mod_base = OTHER; note = 2'-deoxy-2'-fluoroadenosine-3'-phosphate
  modified_base 17: mod_base = OTHER; note = 2'-O-methylguanosine-3'-phosphate
  modified_base 18: mod_base = OTHER; note = 2'-O-methylcytidine-3'-phosphate
  modified_base 19: mod_base = OTHER; note = 2'-O-methyluridine-3'-phosphate
  modified_base 20: mod_base = OTHER; note = 2'-O-methyluridine-3'-phosphate
  modified_base 21: mod_base = OTHER; note = 2'-O-methylcytidine-3'-phosphorothioate
  modified_base 22: mod_base = OTHER; note = 2'-O-methyladenosine-3'-phosphorothioate
  modified_base 23: mod_base = OTHER; note = 2'-O-methylguanosine
aactaaattacccaaagcttcag

SEQ ID NO: 5151 - RNA, 23 nt, synthetic construct
  source 1..23: mol_type = other RNA
  modified_base 1: mod_base = OTHER; note = 2'-O-methyladenosine-3'-phosphorothioate
  modified_base 2: mod_base = OTHER; note = 2'-deoxy-2'-fluoroadenosine-3'-phosphorothioate
  modified_base 3: mod_base = OTHER; note = 2'-O-methyladenosine-3'-phosphate
  modified_base 4: mod_base = OTHER; note = 2'-O-methylguanosine-3'-phosphate
  modified_base 5: mod_base = OTHER; note = 2'-O-methyluridine-3'-phosphate
  modified_base 6: mod_base = OTHER; note = 2'-deoxy-2'-fluorocytidine-3'-phosphate
  modified_base 7: mod_base = OTHER; note = 2'-O-methyluridine-3'-phosphate
  modified_base 8: mod_base = OTHER; note = 2'-deoxy-2'-fluoroguanosine-3'-phosphate
  modified_base 9: mod_base = OTHER; note = 2'-deoxy-2'-fluorocytidine-3'-phosphate
  modified_base 10: mod_base = OTHER; note = 2'-O-methylcytidine-3'-phosphate
  modified_base 11: mod_base = OTHER; note = 2'-O-methyladenosine-3'-phosphate
  modified_base 12: mod_base = OTHER; note = 2'-O-methyladenosine-3'-phosphate
  modified_base 13: mod_base = OTHER; note = 2'-O-methyluridine-3'-phosphate
  modified_base 14: mod_base = OTHER; note = 2'-deoxy-2'-fluorouridine-3'-phosphate
  modified_base 15: mod_base = OTHER; note = 2'-O-methyluridine-3'-phosphate
  modified_base 16: mod_base = OTHER; note = 2'-deoxy-2'-fluorocytidine-3'-phosphate
  modified_base 17: mod_base = OTHER; note = 2'-O-methyladenosine-3'-phosphate
  modified_base 18: mod_base = OTHER; note = 2'-O-methylcytidine-3'-phosphate
  modified_base 19: mod_base = OTHER; note = 2'-O-methyladenosine-3'-phosphate
  modified_base 20: mod_base = OTHER; note = 2'-O-methylguanosine-3'-phosphate
  modified_base 21: mod_base = OTHER; note = 2'-O-methylcytidine-3'-phosphorothioate
  modified_base 22: mod_base = OTHER; note = 2'-O-methyluridine-3'-phosphorothioate
  modified_base 23: mod_base = OTHER; note = 2'-O-methylguanosine
aaagtctgccaatttcacagctg

SEQ ID NO: 5152 - RNA, 23 nt, synthetic construct
  source 1..23: mol_type = other RNA
  modified_base 1: mod_base = OTHER; note = 2'-O-methyladenosine-3'-phosphorothioate
  modified_base 2: mod_base = OTHER; note = 2'-deoxy-2'-fluorouridine-3'-phosphorothioate
  modified_base 3: mod_base = OTHER; note = 2'-O-methylcytidine-3'-phosphate
  modified_base 4: mod_base = OTHER; note = 2'-O-methyladenosine-3'-phosphate
  modified_base 5: mod_base = OTHER; note = 2'-O-methyluridine-3'-phosphate
  modified_base 6: mod_base = OTHER; note = 2'-deoxy-2'-fluorocytidine-3'-phosphate
  modified_base 7: mod_base = OTHER; note = 2'-O-methylcytidine-3'-phosphate
  modified_base 8: mod_base = OTHER; note = 2'-deoxy-2'-fluorocytidine-3'-phosphate
  modified_base 9: mod_base = OTHER; note = 2'-deoxy-2'-fluoroadenosine-3'-phosphate
  modified_base 10: mod_base = OTHER; note = 2'-O-methylcytidine-3'-phosphate
  modified_base 11: mod_base = OTHER; note = 2'-O-methyluridine-3'-phosphate
  modified_base 12: mod_base = OTHER; note = 2'-O-methyluridine-3'-phosphate
  modified_base 13: mod_base = OTHER; note = 2'-O-methyluridine-3'-phosphate
  modified_base 14: mod_base = OTHER; note = 2'-deoxy-2'-fluoroadenosine-3'-phosphate
  modified_base 15: mod_base = OTHER; note = 2'-O-methyladenosine-3'-phosphate
  modified_base 16: mod_base = OTHER; note = 2'-deoxy-2'-fluorouridine-3'-phosphate
  modified_base 17: mod_base = OTHER; note = 2'-O-methyluridine-3'-phosphate
  modified_base 18: mod_base = OTHER; note = 2'-O-methylguanosine-3'-phosphate
  modified_base 19: mod_base = OTHER; note = 2'-O-methyluridine-3'-phosphate
  modified_base 20: mod_base = OTHER; note = 2'-O-methyluridine-3'-phosphate
  modified_base 21: mod_base = OTHER; note = 2'-O-methyladenosine-3'-phosphorothioate
  modified_base 22: mod_base = OTHER; note = 2'-O-methyladenosine-3'-phosphorothioate
  modified_base 23: mod_base = OTHER; note = 2'-O-methyluridine
atcatcccactttaattgttaat

SEQ ID NO: 5153 - RNA, 23 nt, synthetic construct
  source 1..23: mol_type = other RNA
  modified_base 1: mod_base = OTHER; note = 2'-O-methyladenosine-3'-phosphorothioate
  modified_base 2: mod_base = OTHER; note = 2'-deoxy-2'-fluoroadenosine-3'-phosphorothioate
  modified_base 3: mod_base = OTHER; note = 2'-O-methylguanosine-3'-phosphate
  modified_base 4: mod_base = OTHER; note = 2'-O-methyladenosine-3'-phosphate
  modified_base 5: mod_base = OTHER; note = 2'-O-methyladenosine-3'-phosphate
  modified_base 6: mod_base = OTHER; note = 2'-deoxy-2'-fluoroadenosine-3'-phosphate
  modified_base 7: mod_base = OTHER; note = 2'-O-methyluridine-3'-phosphate
  modified_base 8: mod_base = OTHER; note = 2'-deoxy-2'-fluorouridine-3'-phosphate
  modified_base 9: mod_base = OTHER; note = 2'-deoxy-2'-fluorocytidine-3'-phosphate
  modified_base 10: mod_base = OTHER; note = 2'-O-methylcytidine-3'-phosphate
  modified_base 11: mod_base = OTHER; note = 2'-O-methyluridine-3'-phosphate
  modified_base 12: mod_base = OTHER; note = 2'-O-methyluridine-3'-phosphate
  modified_base 13: mod_base = OTHER; note = 2'-O-methylguanosine-3'-phosphate
  modified_base 14: mod_base = OTHER; note = 2'-deoxy-2'-fluorouridine-3'-phosphate
  modified_base 15: mod_base = OTHER; note = 2'-O-methyladenosine-3'-phosphate
  modified_base 16: mod_base = OTHER; note = 2'-deoxy-2'-fluoroguanosine-3'-phosphate
  modified_base 17: mod_base = OTHER; note = 2'-O-methylcytidine-3'-phosphate
  modified_base 18: mod_base = OTHER; note = 2'-O-methylcytidine-3'-phosphate
  modified_base 19: mod_base = OTHER; note = 2'-O-methyladenosine-3'-phosphate
  modified_base 20: mod_base = OTHER; note = 2'-O-methylguanosine-3'-phosphate
  modified_base 21: mod_base = OTHER; note = 2'-O-methylcytidine-3'-phosphorothioate
  modified_base 22: mod_base = OTHER; note = 2'-O-methyladenosine-3'-phosphorothioate
  modified_base 23: mod_base = OTHER; note = 2'-O-methyluridine
aagaaattccttgtagccagcat

SEQ ID NO: 5154 - RNA, 23 nt, synthetic construct
  source 1..23: mol_type = other RNA
  modified_base 1: mod_base = OTHER; note = 2'-O-methyladenosine-3'-phosphorothioate
  modified_base 2: mod_base = OTHER; note = 2'-deoxy-2'-fluoroguanosine-3'-phosphorothioate
  modified_base 3: mod_base = OTHER; note = 2'-O-methyluridine-3'-phosphate
  modified_base 4: mod_base = OTHER; note = 2'-O-methylguanosine-3'-phosphate
  modified_base 5: mod_base = OTHER; note = 2'-O-methyladenosine-3'-phosphate
  modified_base 6: mod_base = OTHER; note = 2'-deoxy-2'-fluoroguanosine-3'-phosphate
  modified_base 7: mod_base = OTHER; note = 2'-O-methylcytidine-3'-phosphate
  modified_base 8: mod_base = OTHER; note = 2'-deoxy-2'-fluoroadenosine-3'-phosphate
  modified_base 9: mod_base = OTHER; note = 2'-deoxy-2'-fluoroadenosine-3'-phosphate
  modified_base 10: mod_base = OTHER; note = 2'-O-methyladenosine-3'-phosphate
  modified_base 11: mod_base = OTHER; note = 2'-O-methylguanosine-3'-phosphate
  modified_base 12: mod_base = OTHER; note = 2'-O-methyladenosine-3'-phosphate
  modified_base 13: mod_base = OTHER; note = 2'-O-methyladenosine-3'-phosphate
  modified_base 14: mod_base = OTHER; note = 2'-deoxy-2'-fluorouridine-3'-phosphate
  modified_base 15: mod_base = OTHER; note = 2'-O-methyladenosine-3'-phosphate
  modified_base 16: mod_base = OTHER; note = 2'-deoxy-2'-fluoroadenosine-3'-phosphate
  modified_base 17: mod_base = OTHER; note = 2'-O-methyluridine-3'-phosphate
  modified_base 18: mod_base = OTHER; note = 2'-O-methyladenosine-3'-phosphate
  modified_base 19: mod_base = OTHER; note = 2'-O-methyladenosine-3'-phosphate
  modified_base 20: mod_base = OTHER; note = 2'-O-methylcytidine-3'-phosphate
  modified_base 21: mod_base = OTHER; note = 2'-O-methyladenosine-3'-phosphorothioate
  modified_base 22: mod_base = OTHER; note = 2'-O-methyladenosine-3'-phosphorothioate
  modified_base 23: mod_base = OTHER; note = 2'-O-methyluridine
agtgagcaaagaataataacaat

SEQ ID NO: 5155 - RNA, 23 nt, synthetic construct
  source 1..23: mol_type = other RNA
  modified_base 1: mod_base = OTHER; note = 2'-O-methyladenosine-3'-phosphorothioate
  modified_base 2: mod_base = OTHER; note = 2'-deoxy-2'-fluorocytidine-3'-phosphorothioate
  modified_base 3: mod_base = OTHER; note = 2'-O-methyladenosine-3'-phosphate
  modified_base 4: mod_base = OTHER; note = 2'-O-methylcytidine-3'-phosphate
  modified_base 5: mod_base = OTHER; note = 2'-O-methylcytidine-3'-phosphate
  modified_base 6: mod_base = OTHER; note = 2'-deoxy-2'-fluoroadenosine-3'-phosphate
  modified_base 7: mod_base = OTHER; note = 2'-O-methyladenosine-3'-phosphate
  modified_base 8: mod_base = OTHER; note = 2'-deoxy-2'-fluoroguanosine-3'-phosphate
  modified_base 9: mod_base = OTHER; note = 2'-deoxy-2'-fluorouridine-3'-phosphate
  modified_base 10: mod_base = OTHER; note = 2'-O-methylguanosine-3'-phosphate
  modified_base 11: mod_base = OTHER; note = 2'-O-methylcytidine-3'-phosphate
  modified_base 12: mod_base = OTHER; note = 2'-O-methyladenosine-3'-phosphate
  modified_base 13: mod_base = OTHER; note = 2'-O-methyladenosine-3'-phosphate
  modified_base 14: mod_base = OTHER; note = 2'-deoxy-2'-fluoroadenosine-3'-phosphate
  modified_base 15: mod_base = OTHER; note = 2'-O-methyluridine-3'-phosphate
  modified_base 16: mod_base = OTHER; note = 2'-deoxy-2'-fluorouridine-3'-phosphate
  modified_base 17: mod_base = OTHER; note = 2'-O-methylguanosine-3'-phosphate
  modified_base 18: mod_base = OTHER; note = 2'-O-methyluridine-3'-phosphate
  modified_base 19: mod_base = OTHER; note = 2'-O-methyluridine-3'-phosphate
  modified_base 20: mod_base = OTHER; note = 2'-O-methyladenosine-3'-phosphate
  modified_base 21: mod_base = OTHER; note = 2'-O-methyluridine-3'-phosphorothioate
  modified_base 22: mod_base = OTHER; note = 2'-O-methylguanosine-3'-phosphorothioate
  modified_base 23: mod_base = OTHER; note = 2'-O-methyluridine
acaccaagtgcaaattgttatgt

SEQ ID NO: 5156 - RNA, 23 nt, synthetic construct
  source 1..23: mol_type = other RNA
  modified_base 1: mod_base = OTHER; note = 2'-O-methyladenosine-3'-phosphorothioate
  modified_base 2: mod_base = OTHER; note = 2'-deoxy-2'-fluorocytidine-3'-phosphorothioate
  modified_base 3: mod_base = OTHER; note = 2'-O-methyluridine-3'-phosphate
  modified_base 4: mod_base = OTHER; note = 2'-O-methylcytidine-3'-phosphate
  modified_base 5: mod_base = OTHER; note = 2'-O-methyladenosine-3'-phosphate
  modified_base 6: mod_base = OTHER; note = 2'-deoxy-2'-fluorocytidine-3'-phosphate
  modified_base 7: mod_base = OTHER; note = 2'-O-methyladenosine-3'-phosphate
  modified_base 8: mod_base = OTHER; note = 2'-deoxy-2'-fluorouridine-3'-phosphate
  modified_base 9: mod_base = OTHER; note = 2'-deoxy-2'-fluorocytidine-3'-phosphate
  modified_base 10: mod_base = OTHER; note = 2'-O-methyluridine-3'-phosphate
  modified_base 11: mod_base = OTHER; note = 2'-O-methyluridine-3'-phosphate
  modified_base 12: mod_base = OTHER; note = 2'-O-methyladenosine-3'-phosphate
  modified_base 13: mod_base = OTHER; note = 2'-O-methylguanosine-3'-phosphate
  modified_base 14: mod_base = OTHER; note = 2'-deoxy-2'-fluorouridine-3'-phosphate
  modified_base 15: mod_base = OTHER; note = 2'-O-methylguanosine-3'-phosphate
  modified_base 16: mod_base = OTHER; note = 2'-deoxy-2'-fluorocytidine-3'-phosphate
  modified_base 17: mod_base = OTHER; note = 2'-O-methylguanosine-3'-phosphate
  modified_base 18: mod_base = OTHER; note = 2'-O-methylguanosine-3'-phosphate
  modified_base 19: mod_base = OTHER; note = 2'-O-methyladenosine-3'-phosphate
  modified_base 20: mod_base = OTHER; note = 2'-O-methyladenosine-3'-phosphate
  modified_base 21: mod_base = OTHER; note = 2'-O-methylguanosine-3'-phosphorothioate
  modified_base 22: mod_base = OTHER; note = 2'-O-methyladenosine-3'-phosphorothioate
  modified_base 23: mod_base = OTHER; note = 2'-O-methylcytidine
actcacatcttagtgcggaagac

SEQ ID NO: 5157 - RNA, 23 nt, synthetic construct
  source 1..23: mol_type = other RNA
  modified_base 1: mod_base = OTHER; note = 2'-O-methyladenosine-3'-phosphorothioate
  modified_base 2: mod_base = OTHER; note = 2'-deoxy-2'-fluoroadenosine-3'-phosphorothioate
  modified_base 3: mod_base = OTHER; note = 2'-O-methylcytidine-3'-phosphate
  modified_base 4: mod_base = OTHER; note = 2'-O-methyladenosine-3'-phosphate
  modified_base 5: mod_base = OTHER; note = 2'-O-methylguanosine-3'-phosphate
  modified_base 6: mod_base = OTHER; note = 2'-deoxy-2'-fluoroadenosine-3'-phosphate
  modified_base 7: mod_base = OTHER; note = 2'-O-methylguanosine-3'-phosphate
  modified_base 8: mod_base = OTHER; note = 2'-deoxy-2'-fluoroadenosine-3'-phosphate
  modified_base 9: mod_base = OTHER; note = 2'-deoxy-2'-fluoroguanosine-3'-phosphate
  modified_base 10: mod_base = OTHER; note = 2'-O-methylguanosine-3'-phosphate
  modified_base 11: mod_base = OTHER; note = 2'-O-methyluridine-3'-phosphate
  modified_base 12: mod_base = OTHER; note = 2'-O-methylguanosine-3'-phosphate
  modified_base 13: mod_base = OTHER; note = 2'-O-methyladenosine-3'-phosphate
  modified_base 14: mod_base = OTHER; note = 2'-deoxy-2'-fluoroguanosine-3'-phosphate
  modified_base 15: mod_base = OTHER; note = 2'-O-methyladenosine-3'-phosphate
  modified_base 16: mod_base = OTHER; note = 2'-deoxy-2'-fluorouridine-3'-phosphate
  modified_base 17: mod_base = OTHER; note = 2'-O-methylguanosine-3'-phosphate
  modified_base 18: mod_base = OTHER; note = 2'-O-methyladenosine-3'-phosphate
  modified_base 19: mod_base = OTHER; note = 2'-O-methylguanosine-3'-phosphate
  modified_base 20: mod_base = OTHER; note = 2'-O-methyladenosine-3'-phosphate
  modified_base 21: mod_base = OTHER; note = 2'-O-methylguanosine-3'-phosphorothioate
  modified_base 22: mod_base = OTHER; note = 2'-O-methyladenosine-3'-phosphorothioate
  modified_base 23: mod_base = OTHER; note = 2'-O-methyladenosine
aacagagaggtgagatgagagaa

SEQ ID NO: 5158 - RNA, 23 nt, synthetic construct
  source 1..23: mol_type = other RNA
  modified_base 1: mod_base = OTHER; note = 2'-O-methyladenosine-3'-phosphorothioate
  modified_base 2: mod_base = OTHER; note = 2'-deoxy-2'-fluorocytidine-3'-phosphorothioate
  modified_base 3: mod_base = OTHER; note = 2'-O-methylguanosine-3'-phosphate
  modified_base 4: mod_base = OTHER; note = 2'-O-methyluridine-3'-phosphate
  modified_base 5: mod_base = OTHER; note = 2'-O-methyluridine-3'-phosphate
  modified_base 6: mod_base = OTHER; note = 2'-deoxy-2'-fluoroguanosine-3'-phosphate
  modified_base 7: mod_base = OTHER; note = 2'-O-methyladenosine-3'-phosphate
  modified_base 8: mod_base = OTHER; note = 2'-deoxy-2'-fluorocytidine-3'-phosphate
  modified_base 9: mod_base = OTHER; note = 2'-deoxy-2'-fluoroadenosine-3'-phosphate
  modified_base 10: mod_base = OTHER; note = 2'-O-methylguanosine-3'-phosphate
  modified_base 11: mod_base = OTHER; note = 2'-O-methyladenosine-3'-phosphate
  modified_base 12: mod_base = OTHER; note = 2'-O-methyluridine-3'-phosphate
  modified_base 13: mod_base = OTHER; note = 2'-O-methylcytidine-3'-phosphate
  modified_base 14: mod_base = OTHER; note = 2'-deoxy-2'-fluorocytidine-3'-phosphate
  modified_base 15: mod_base = OTHER; note = 2'-O-methyladenosine-3'-phosphate
  modified_base 16: mod_base = OTHER; note = 2'-deoxy-2'-fluorouridine-3'-phosphate
  modified_base 17: mod_base = OTHER; note = 2'-O-methylguanosine-3'-phosphate
  modified_base 18: mod_base = OTHER; note = 2'-O-methylguanosine-3'-phosphate
  modified_base 19: mod_base = OTHER; note = 2'-O-methylguanosine-3'-phosphate
  modified_base 20: mod_base = OTHER; note = 2'-O-methyluridine-3'-phosphate
  modified_base 21: mod_base = OTHER; note = 2'-O-methylguanosine-3'-phosphorothioate
  modified_base 22: mod_base = OTHER; note = 2'-O-methylcytidine-3'-phosphorothioate
  modified_base 23: mod_base = OTHER; note = 2'-O-methyluridine
acgttgacagatccatgggtgct

SEQ ID NO: 5159 - RNA, 23 nt, synthetic construct
  source 1..23: mol_type = other RNA
  modified_base 1: mod_base = OTHER; note = 2'-O-methyladenosine-3'-phosphorothioate
  modified_base 2: mod_base = OTHER; note = 2'-deoxy-2'-fluoroadenosine-3'-phosphorothioate
  modified_base 3: mod_base = OTHER; note = 2'-O-methylguanosine-3'-phosphate
  modified_base 4: mod_base = OTHER; note = 2'-O-methyladenosine-3'-phosphate
  modified_base 5: mod_base = OTHER; note = 2'-O-methyladenosine-3'-phosphate
  modified_base 6: mod_base = OTHER; note = 2'-deoxy-2'-fluoroguanosine-3'-phosphate
  modified_base 7: mod_base = OTHER; note = 2'-O-methyluridine-3'-phosphate
  modified_base 8: mod_base = OTHER; note = 2'-deoxy-2'-fluorocytidine-3'-phosphate
  modified_base 9: mod_base = OTHER; note = 2'-deoxy-2'-fluoroadenosine-3'-phosphate
  modified_base 10: mod_base = OTHER; note = 2'-O-methylguanosine-3'-phosphate
  modified_base 11: mod_base = OTHER; note = 2'-O-methyluridine-3'-phosphate
  modified_base 12: mod_base = OTHER; note = 2'-O-methyladenosine-3'-phosphate
  modified_base 13: mod_base = OTHER; note = 2'-O-methylguanosine-3'-phosphate
  modified_base 14: mod_base = OTHER; note = 2'-deoxy-2'-fluoroadenosine-3'-phosphate
  modified_base 15: mod_base = OTHER; note = 2'-O-methyladenosine-3'-phosphate
  modified_base 16: mod_base = OTHER; note = 2'-deoxy-2'-fluorouridine-3'-phosphate
  modified_base 17: mod_base = OTHER; note = 2'-O-methyluridine-3'-phosphate
  modified_base 18: mod_base = OTHER; note = 2'-O-methyluridine-3'-phosphate
  modified_base 19: mod_base = OTHER; note = 2'-O-methyluridine-3'-phosphate
  modified_base 20: mod_base = OTHER; note = 2'-O-methyladenosine-3'-phosphate
  modified_base 21: mod_base = OTHER; note = 2'-O-methyluridine-3'-phosphorothioate
  modified_base 22: mod_base = OTHER; note = 2'-O-methyluridine-3'-phosphorothioate
  modified_base 23: mod_base = OTHER; note = 2'-O-methylcytidine
aagaagtcagtagaattttattc

SEQ ID NO: 5160 - RNA, 23 nt, synthetic construct
  source 1..23: mol_type = other RNA
  modified_base 1: mod_base = OTHER; note = 2'-O-methyladenosine-3'-phosphorothioate
  modified_base 2: mod_base = OTHER; note = 2'-deoxy-2'-fluoroguanosine-3'-phosphorothioate
  modified_base 3: mod_base = OTHER; note = 2'-O-methylcytidine-3'-phosphate
  modified_base 4: mod_base = OTHER; note = 2'-O-methyladenosine-3'-phosphate
  modified_base 5: mod_base = OTHER; note = 2'-O-methyluridine-3'-phosphate
  modified_base 6: mod_base = OTHER; note = 2'-deoxy-2'-fluoroadenosine-3'-phosphate
  modified_base 7: mod_base = OTHER; note = 2'-O-methylguanosine-3'-phosphate
  modified_base 8: mod_base = OTHER; note = 2'-deoxy-2'-fluorouridine-3'-phosphate
  modified_base 9: mod_base = OTHER; note = 2'-deoxy-2'-fluorouridine-3'-phosphate
  modified_base 10: mod_base = OTHER; note = 2'-O-methylguanosine-3'-phosphate
  modified_base 11: mod_base = OTHER; note = 2'-O-methyluridine-3'-phosphate
  modified_base 12: mod_base = OTHER; note = 2'-O-methylcytidine-3'-phosphate
  modified_base 13: mod_base = OTHER; note = 2'-O-methyladenosine-3'-phosphate
  modified_base 14: mod_base = OTHER; note = 2'-deoxy-2'-fluoroadenosine-3'-phosphate
  modified_base 15: mod_base = OTHER; note = 2'-O-methylguanosine-3'-phosphate
  modified_base 16: mod_base = OTHER; note = 2'-deoxy-2'-fluoroadenosine-3'-phosphate
  modified_base 17: mod_base = OTHER; note = 2'-O-methyluridine-3'-phosphate
  modified_base 18: mod_base = OTHER; note = 2'-O-methylguanosine-3'-phosphate
  modified_base 19: mod_base = OTHER; note = 2'-O-methylguanosine-3'-phosphate
  modified_base 20: mod_base = OTHER; note = 2'-O-methylcytidine-3'-phosphate
  modified_base 21: mod_base = OTHER; note = 2'-O-methyladenosine-3'-phosphorothioate
  modified_base 22: mod_base = OTHER; note = 2'-O-methylcytidine-3'-phosphorothioate
  modified_base 23: mod_base = OTHER; note = 2'-O-methylcytidine
agcatagttgtcaagatggcacc

SEQ ID NO: 5161 - RNA, 23 nt, synthetic construct
  source 1..23: mol_type = other RNA
  modified_base 1: mod_base = OTHER; note = 2'-O-methyladenosine-3'-phosphorothioate
  modified_base 2: mod_base = OTHER; note = 2'-deoxy-2'-fluorocytidine-3'-phosphorothioate
  modified_base 3: mod_base = OTHER; note = 2'-O-methyladenosine-3'-phosphate
  modified_base 4: mod_base = OTHER; note = 2'-O-methyluridine-3'-phosphate
  modified_base 5: mod_base = OTHER; note = 2'-O-methyladenosine-3'-phosphate
  modified_base 6: mod_base = OTHER; note = 2'-deoxy-2'-fluoroguanosine-3'-phosphate
  modified_base 7: mod_base = OTHER; note = 2'-O-methyluridine-3'-phosphate
  modified_base 8: mod_base = OTHER; note = 2'-deoxy-2'-fluorouridine-3'-phosphate
  modified_base 9: mod_base = OTHER; note = 2'-deoxy-2'-fluoroadenosine-3'-phosphate
  modified_base 10: mod_base = OTHER; note = 2'-O-methylguanosine-3'-phosphate
  modified_base 11: mod_base = OTHER; note = 2'-O-methylguanosine-3'-phosphate
  modified_base 12: mod_base = OTHER; note = 2'-O-methyladenosine-3'-phosphate
  modified_base 13: mod_base = OTHER; note = 2'-O-methyluridine-3'-phosphate
  modified_base 14: mod_base = OTHER; note = 2'-deoxy-2'-fluoroadenosine-3'-phosphate
  modified_base 15: mod_base = OTHER; note = 2'-O-methylcytidine-3'-phosphate
  modified_base 16: mod_base = OTHER; note = 2'-deoxy-2'-fluorocytidine-3'-phosphate
  modified_base 17: mod_base = OTHER; note = 2'-O-methyluridine-3'-phosphate
  modified_base 18: mod_base = OTHER; note = 2'-O-methyladenosine-3'-phosphate
  modified_base 19: mod_base = OTHER; note = 2'-O-methyladenosine-3'-phosphate
  modified_base 20: mod_base = OTHER; note = 2'-O-methylguanosine-3'-phosphate
  modified_base 21: mod_base = OTHER; note = 2'-O-methyluridine-3'-phosphorothioate
  modified_base 22: mod_base = OTHER; note = 2'-O-methylcytidine-3'-phosphorothioate
  modified_base 23: mod_base = OTHER; note = 2'-O-methylcytidine
acatagttaggatacctaagtcc

SEQ ID NO: 5162 - RNA, 23 nt, synthetic construct
  source 1..23: mol_type = other RNA
  modified_base 1: mod_base = OTHER; note = 2'-O-methyladenosine-3'-phosphorothioate
  modified_base 2: mod_base = OTHER; note = 2'-deoxy-2'-fluoroadenosine-3'-phosphorothioate
  modified_base 3: mod_base = OTHER; note = 2'-O-methylguanosine-3'-phosphate
  modified_base 4: mod_base = OTHER; note = 2'-O-methylcytidine-3'-phosphate
  modified_base 5: mod_base = OTHER; note = 2'-O-methyladenosine-3'-phosphate
  modified_base 6: mod_base = OTHER; note = 2'-deoxy-2'-fluoroguanosine-3'-phosphate
  modified_base 7: mod_base = OTHER; note = 2'-O-methylguanosine-3'-phosphate
  modified_base 8: mod_base = OTHER; note = 2'-deoxy-2'-fluoroadenosine-3'-phosphate
  modified_base 9: mod_base = OTHER; note = 2'-deoxy-2'-fluoroguanosine-3'-phosphate
  modified_base 10: mod_base = OTHER; note = 2'-O-methylguanosine-3'-phosphate
  modified_base 11: mod_base = OTHER; note = 2'-O-methyladenosine-3'-phosphate
  modified_base 12: mod_base = OTHER; note = 2'-O-methylguanosine-3'-phosphate
  modified_base 13: mod_base = OTHER; note = 2'-O-methyluridine-3'-phosphate
  modified_base 14: mod_base = OTHER; note = 2'-deoxy-2'-fluoroadenosine-3'-phosphate
  modified_base 15: mod_base = OTHER; note = 2'-O-methylguanosine-3'-phosphate
  modified_base 16: mod_base = OTHER; note = 2'-deoxy-2'-fluoroadenosine-3'-phosphate
  modified_base 17: mod_base = OTHER; note = 2'-O-methyladenosine-3'-phosphate
  modified_base 18: mod_base = OTHER; note = 2'-O-methylguanosine-3'-phosphate
  modified_base 19: mod_base = OTHER; note = 2'-O-methylcytidine-3'-phosphate
  modified_base 20: mod_base = OTHER; note = 2'-O-methyladenosine-3'-phosphate
  modified_base 21: mod_base = OTHER; note = 2'-O-methylguanosine-3'-phosphorothioate
  modified_base 22: mod_base = OTHER; note = 2'-O-methyladenosine-3'-phosphorothioate
  modified_base 23: mod_base = OTHER; note = 2'-O-methylguanosine
aagcaggaggagtagaagcagag

SEQ ID NO: 5163 - RNA, 23 nt, synthetic construct
  source 1..23: mol_type = other RNA
  modified_base 1: mod_base = OTHER; note = 2'-O-methyladenosine-3'-phosphorothioate
  modified_base 2: mod_base = OTHER; note = 2'-deoxy-2'-fluoroadenosine-3'-phosphorothioate
  modified_base 3: mod_base = OTHER; note = 2'-O-methyladenosine-3'-phosphate
  modified_base 4: mod_base = OTHER; note = 2'-O-methylcytidine-3'-phosphate
  modified_base 5: mod_base = OTHER; note = 2'-O-methyladenosine-3'-phosphate
  modified_base 6: mod_base = OTHER; note = 2'-deoxy-2'-fluoroadenosine-3'-phosphate
  modified_base 7: mod_base = OTHER; note = 2'-O-methyladenosine-3'-phosphate
  modified_base 8: mod_base = OTHER; note = 2'-deoxy-2'-fluorouridine-3'-phosphate
  modified_base 9: mod_base = OTHER; note = 2'-deoxy-2'-fluorocytidine-3'-phosphate
  modified_base 10: mod_base = OTHER; note = 2'-O-methyladenosine-3'-phosphate
  modified_base 11: mod_base = OTHER; note = 2'-O-methylcytidine-3'-phosphate
  modified_base 12: mod_base = OTHER; note = 2'-O-methyladenosine-3'-phosphate
  modified_base 13: mod_base = OTHER; note = 2'-O-methyladenosine-3'-phosphate
  modified_base 14: mod_base = OTHER; note = 2'-deoxy-2'-fluorouridine-3'-phosphate
  modified_base 15: mod_base = OTHER; note = 2'-O-methyluridine-3'-phosphate
  modified_base 16: mod_base = OTHER; note = 2'-deoxy-2'-fluorouridine-3'-phosphate
  modified_base 17: mod_base = OTHER; note = 2'-O-methylcytidine-3'-phosphate
  modified_base 18: mod_base = OTHER; note = 2'-O-methylcytidine-3'-phosphate
  modified_base 19: mod_base = OTHER; note = 2'-O-methyluridine-3'-phosphate
  modified_base 20: mod_base = OTHER; note = 2'-O-methylcytidine-3'-phosphate
  modified_base 21: mod_base = OTHER; note = 2'-O-methyladenosine-3'-phosphorothioate
  modified_base 22: mod_base = OTHER; note = 2'-O-methylcytidine-3'-phosphorothioate
  modified_base 23: mod_base = OTHER; note = 2'-O-methyladenosine
aaacaaatcacaatttcctcaca

SEQ ID NO: 5164 - RNA, 23 nt, synthetic construct
  source 1..23: mol_type = other RNA
  modified_base 1: mod_base = OTHER; note = 2'-O-methyladenosine-3'-phosphorothioate
  modified_base 2: mod_base = OTHER; note = 2'-deoxy-2'-fluorouridine-3'-phosphorothioate
  modified_base 3: mod_base = OTHER; note = 2'-O-methylcytidine-3'-phosphate
  modified_base 4: mod_base = OTHER; note = 2'-O-methylguanosine-3'-phosphate
  modified_base 5: mod_base = OTHER; note = 2'-O-methyladenosine-3'-phosphate
  modified_base 6: mod_base = OTHER; note = 2'-deoxy-2'-fluoroadenosine-3'-phosphate
  modified_base 7: mod_base = OTHER; note = 2'-O-methyladenosine-3'-phosphate
  modified_base 8: mod_base = OTHER; note = 2'-deoxy-2'-fluoroadenosine-3'-phosphate
  modified_base 9: mod_base = OTHER; note = 2'-deoxy-2'-fluoroguanosine-3'-phosphate
  modified_base 10: mod_base = OTHER; note = 2'-O-methylcytidine-3'-phosphate
  modified_base 11: mod_base = OTHER; note = 2'-O-methyluridine-3'-phosphate
  modified_base 12: mod_base = OTHER; note = 2'-O-methylguanosine-3'-phosphate
  modified_base 13: mod_base = OTHER; note = 2'-O-methyladenosine-3'-phosphate
  modified_base 14: mod_base = OTHER; note = 2'-deoxy-2'-fluorouridine-3'-phosphate
  modified_base 15: mod_base = OTHER; note = 2'-O-methyladenosine-3'-phosphate
  modified_base 16: mod_base = OTHER; note = 2'-deoxy-2'-fluorocytidine-3'-phosphate
  modified_base 17: mod_base = OTHER; note = 2'-O-methyluridine-3'-phosphate
  modified_base 18: mod_base = OTHER; note = 2'-O-methylcytidine-3'-phosphate
  modified_base 19: mod_base = OTHER; note = 2'-O-methylguanosine-3'-phosphate
  modified_base 20: mod_base = OTHER; note = 2'-O-methyluridine-3'-phosphate
  modified_base 21: mod_base = OTHER; note = 2'-O-methylcytidine-3'-phosphorothioate
  modified_base 22: mod_base = OTHER; note = 2'-O-methylcytidine-3'-phosphorothioate
  modified_base 23: mod_base = OTHER; note = 2'-O-methylguanosine
atcgaaaagctgatactcgtccg

SEQ ID NO: 5165 - RNA, 23 nt, synthetic construct
  source 1..23: mol_type = other RNA
  modified_base 1: mod_base = OTHER; note = 2'-O-methyladenosine-3'-phosphorothioate
  modified_base 2: mod_base = OTHER; note = 2'-deoxy-2'-fluoroguanosine-3'-phosphorothioate
  modified_base 3: mod_base = OTHER; note = 2'-O-methyladenosine-3'-phosphate
  modified_base 4: mod_base = OTHER; note = 2'-O-methyladenosine-3'-phosphate
  modified_base 5: mod_base = OTHER; note = 2'-O-methyladenosine-3'-phosphate
  modified_base 6: mod_base = OTHER; note = 2'-deoxy-2'-fluorocytidine-3'-phosphate
  modified_base 7: mod_base = OTHER; note = 2'-O-methyluridine-3'-phosphate
  modified_base 8: mod_base = OTHER; note = 2'-deoxy-2'-fluoroguanosine-3'-phosphate
  modified_base 9: mod_base = OTHER; note = 2'-deoxy-2'-fluoroadenosine-3'-phosphate
  modified_base 10: mod_base = OTHER; note = 2'-O-methylguanosine-3'-phosphate
  modified_base 11: mod_base = OTHER; note = 2'-O-methylguanosine-3'-phosphate
  modified_base 12: mod_base = OTHER; note = 2'-O-methylguanosine-3'-phosphate
  modified_base 13: mod_base = OTHER; note = 2'-O-methyluridine-3'-phosphate
  modified_base 14: mod_base = OTHER; note = 2'-deoxy-2'-fluorocytidine-3'-phosphate
  modified_base 15: mod_base = OTHER; note = 2'-O-methyladenosine-3'-phosphate
  modified_base 16: mod_base = OTHER; note = 2'-deoxy-2'-fluoroguanosine-3'-phosphate
  modified_base 17: mod_base = OTHER; note = 2'-O-methyladenosine-3'-phosphate
  modified_base 18: mod_base = OTHER; note = 2'-O-methylguanosine-3'-phosphate
  modified_base 19: mod_base = OTHER; note = 2'-O-methylguanosine-3'-phosphate
  modified_base 20: mod_base = OTHER; note = 2'-O-methylguanosine-3'-phosphate
  modified_base 21: mod_base = OTHER; note = 2'-O-methyladenosine-3'-phosphorothioate
  modified_base 22: mod_base = OTHER; note = 2'-O-methyladenosine-3'-phosphorothioate
  modified_base 23: mod_base = OTHER; note = 2'-O-methylguanosine
agaaactgagggtcagagggaag

SEQ ID NO: 5166 - RNA, 23 nt, synthetic construct
  source 1..23: mol_type = other RNA
  modified_base 1: mod_base = OTHER; note = 2'-O-methyladenosine-3'-phosphorothioate
  modified_base 2: mod_base = OTHER; note = 2'-deoxy-2'-fluoroguanosine-3'-phosphorothioate
  modified_base 3: mod_base = OTHER; note = 2'-O-methylcytidine-3'-phosphate
  modified_base 4: mod_base = OTHER; note = 2'-O-methyluridine-3'-phosphate
  modified_base 5: mod_base = OTHER; note = 2'-O-methyluridine-3'-phosphate
  modified_base 6: mod_base = OTHER; note = 2'-deoxy-2'-fluorocytidine-3'-phosphate
  modified_base 7: mod_base = OTHER; note = 2'-O-methyluridine-3'-phosphate
  modified_base 8: mod_base = OTHER; note = 2'-deoxy-2'-fluoroguanosine-3'-phosphate
  modified_base 9: mod_base = OTHER; note = 2'-deoxy-2'-fluorouridine-3'-phosphate
  modified_base 10: mod_base = OTHER; note = 2'-O-methyluridine-3'-phosphate
  modified_base 11: mod_base = OTHER; note = 2'-O-methyladenosine-3'-phosphate
  modified_base 12: mod_base = OTHER; note = 2'-O-methyluridine-3'-phosphate
  modified_base 13: mod_base = OTHER; note = 2'-O-methylcytidine-3'-phosphate
  modified_base 14: mod_base = OTHER; note = 2'-deoxy-2'-fluoroadenosine-3'-phosphate
  modified_base 15: mod_base = OTHER; note = 2'-O-methyladenosine-3'-phosphate
  modified_base 16: mod_base = OTHER; note = 2'-deoxy-2'-fluoroadenosine-3'-phosphate
  modified_base 17: mod_base = OTHER; note = 2'-O-methyladenosine-3'-phosphate
  modified_base 18: mod_base = OTHER; note = 2'-O-methylguanosine-3'-phosphate
  modified_base 19: mod_base = OTHER; note = 2'-O-methylguanosine-3'-phosphate
  modified_base 20: mod_base = OTHER; note = 2'-O-methylguanosine-3'-phosphate
  modified_base 21: mod_base = OTHER; note = 2'-O-methylcytidine-3'-phosphorothioate
  modified_base 22: mod_base = OTHER; note = 2'-O-methyluridine-3'-phosphorothioate
  modified_base 23: mod_base = OTHER; note = 2'-O-methyluridine
agcttctgttatcaaaagggctt

SEQ ID NO: 5167 - RNA, 23 nt, synthetic construct
  source 1..23: mol_type = other RNA
  modified_base 1: mod_base = OTHER; note = 2'-O-methyladenosine-3'-phosphorothioate
  modified_base 2: mod_base = OTHER; note = 2'-deoxy-2'-fluoroadenosine-3'-phosphorothioate
  modified_base 3: mod_base = OTHER; note = 2'-O-methylcytidine-3'-phosphate
  modified_base 4: mod_base = OTHER; note = 2'-O-methyluridine-3'-phosphate
  modified_base 5: mod_base = OTHER; note = 2'-O-methylguanosine-3'-phosphate
  modified_base 6: mod_base = OTHER; note = 2'-deoxy-2'-fluorocytidine-3'-phosphate
  modified_base 7: mod_base = OTHER; note = 2'-O-methyluridine-3'-phosphate
  modified_base 8: mod_base = OTHER; note = 2'-deoxy-2'-fluoroadenosine-3'-phosphate
  modified_base 9: mod_base = OTHER; note = 2'-deoxy-2'-fluorocytidine-3'-phosphate
  modified_base 10: mod_base = OTHER; note = 2'-O-methylcytidine-3'-phosphate
  modified_base 11: mod_base = OTHER; note = 2'-O-methyladenosine-3'-phosphate
  modified_base 12: mod_base = OTHER; note = 2'-O-methyluridine-3'-phosphate
  modified_base 13: mod_base = OTHER; note = 2'-O-methyluridine-3'-phosphate
  modified_base 14: mod_base = OTHER; note = 2'-deoxy-2'-fluorouridine-3'-phosphate
  modified_base 15: mod_base = OTHER; note = 2'-O-methyladenosine-3'-phosphate
  modified_base 16: mod_base = OTHER; note = 2'-deoxy-2'-fluoroadenosine-3'-phosphate
  modified_base 17: mod_base = OTHER; note = 2'-O-methyluridine-3'-phosphate
  modified_base 18: mod_base = OTHER; note = 2'-O-methyluridine-3'-phosphate
  modified_base 19: mod_base = OTHER; note = 2'-O-methyluridine-3'-phosphate
  modified_base 20: mod_base = OTHER; note = 2'-O-methylcytidine-3'-phosphate
  modified_base 21: mod_base = OTHER; note = 2'-O-methyluridine-3'-phosphorothioate
  modified_base 22: mod_base = OTHER; note = 2'-O-methyladenosine-3'-phosphorothioate
  modified_base 23: mod_base = OTHER; note = 2'-O-methyluridine
aactgctaccatttaatttctat

SEQ ID NO: 5168 - RNA, 23 nt, synthetic construct
  source 1..23: mol_type = other RNA
  modified_base 1: mod_base = OTHER; note = 2'-O-methyladenosine-3'-phosphorothioate
  modified_base 2: mod_base = OTHER; note = 2'-deoxy-2'-fluoroadenosine-3'-phosphorothioate
  modified_base 3: mod_base = OTHER; note = 2'-O-methylguanosine-3'-phosphate
  modified_base 4: mod_base = OTHER; note = 2'-O-methyladenosine-3'-phosphate
  modified_base 5: mod_base = OTHER; note = 2'-O-methyladenosine-3'-phosphate
  modified_base 6: mod_base = OTHER; note = 2'-deoxy-2'-fluorouridine-3'-phosphate
  modified_base 7: mod_base = OTHER; note = 2'-O-methylcytidine-3'-phosphate
  modified_base 8: mod_base = OTHER; note = 2'-deoxy-2'-fluoroguanosine-3'-phosphate
  modified_base 9: mod_base = OTHER; note = 2'-deoxy-2'-fluoroguanosine-3'-phosphate
  modified_base 10: mod_base = OTHER; note = 2'-O-methyluridine-3'-phosphate
  modified_base 11: mod_base = OTHER; note = 2'-O-methylguanosine-3'-phosphate
  modified_base 12: mod_base = OTHER; note = 2'-O-methyladenosine-3'-phosphate
  modified_base 13: mod_base = OTHER; note = 2'-O-methyladenosine-3'-phosphate
  modified_base 14: mod_base = OTHER; note = 2'-deoxy-2'-fluoroadenosine-3'-phosphate
  modified_base 15: mod_base = OTHER; note = 2'-O-methyladenosine-3'-phosphate
  modified_base 16: mod_base = OTHER; note = 2'-deoxy-2'-fluorouridine-3'-phosphate
  modified_base 17: mod_base = OTHER; note = 2'-O-methylcytidine-3'-phosphate
  modified_base 18: mod_base = OTHER; note = 2'-O-methylcytidine-3'-phosphate
  modified_base 19: mod_base = OTHER; note = 2'-O-methyladenosine-3'-phosphate
  modified_base 20: mod_base = OTHER; note = 2'-O-methyluridine-3'-phosphate
  modified_base 21: mod_base = OTHER; note = 2'-O-methylcytidine-3'-phosphorothioate
  modified_base 22: mod_base = OTHER; note = 2'-O-methylcytidine-3'-phosphorothioate
  modified_base 23: mod_base = OTHER; note = 2'-O-methylcytidine
aagaatcggtgaaaatccatccc

SEQ ID NO: 5169 - RNA, 23 nt, synthetic construct
  source 1..23: mol_type = other RNA
  modified_base 1: mod_base = OTHER; note = 2'-O-methyladenosine-3'-phosphorothioate
  modified_base 2: mod_base = OTHER; note = 2'-deoxy-2'-fluorocytidine-3'-phosphorothioate
  modified_base 3: mod_base = OTHER; note = 2'-O-methyladenosine-3'-phosphate
  modified_base 4: mod_base = OTHER; note = 2'-O-methyluridine-3'-phosphate
  modified_base 5: mod_base = OTHER; note = 2'-O-methylguanosine-3'-phosphate
  modified_base 6: mod_base = OTHER; note = 2'-deoxy-2'-fluorouridine-3'-phosphate
  modified_base 7: mod_base = OTHER; note = 2'-O-methylguanosine-3'-phosphate
  modified_base 8: mod_base = OTHER; note = 2'-deoxy-2'-fluoroadenosine-3'-phosphate
  modified_base 9: mod_base = OTHER; note = 2'-deoxy-2'-fluoroguanosine-3'-phosphate
  modified_base 10: mod_base = OTHER; note = 2'-O-methylcytidine-3'-phosphate
  modified_base 11: mod_base = OTHER; note = 2'-O-methyladenosine-3'-phosphate
  modified_base 12: mod_base = OTHER; note = 2'-O-methyladenosine-3'-phosphate
  modified_base 13: mod_base = OTHER; note = 2'-O-methylguanosine-3'-phosphate
  modified_base 14: mod_base = OTHER; note = 2'-deoxy-2'-fluorouridine-3'-phosphate
  modified_base 15: mod_base = OTHER; note = 2'-O-methylguanosine-3'-phosphate
  modified_base 16: mod_base = OTHER; note = 2'-deoxy-2'-fluorouridine-3'-phosphate
  modified_base 17: mod_base = OTHER; note = 2'-O-methylguanosine-3'-phosphate
  modified_base 18: mod_base = OTHER; note = 2'-O-methyladenosine-3'-phosphate
  modified_base 19: mod_base = OTHER; note = 2'-O-methyluridine-3'-phosphate
  modified_base 20: mod_base = OTHER; note = 2'-O-methylguanosine-3'-phosphate
  modified_base 21: mod_base = OTHER; note = 2'-O-methyluridine-3'-phosphorothioate
  modified_base 22: mod_base = OTHER; note = 2'-O-methyluridine-3'-phosphorothioate
  modified_base 23: mod_base = OTHER; note = 2'-O-methyluridine
acatgtgagcaagtgtgatgttt

SEQ ID NO: 5170 - RNA, 23 nt, synthetic construct
  source 1..23: mol_type = other RNA
  modified_base 1: mod_base = OTHER; note = 2'-O-methyladenosine-3'-phosphorothioate
  modified_base 2: mod_base = OTHER; note = 2'-deoxy-2'-fluoroadenosine-3'-phosphorothioate
  modified_base 3: mod_base = OTHER; note = 2'-O-methyladenosine-3'-phosphate
  modified_base 4: mod_base = OTHER; note = 2'-O-methyluridine-3'-phosphate
  modified_base 5: mod_base = OTHER; note = 2'-O-methylguanosine-3'-phosphate
  modified_base 6: mod_base = OTHER; note = 2'-deoxy-2'-fluoroguanosine-3'-phosphate
  modified_base 7: mod_base = OTHER; note = 2'-O-methyluridine-3'-phosphate
  modified_base 8: mod_base = OTHER; note = 2'-deoxy-2'-fluorouridine-3'-phosphate
  modified_base 9: mod_base = OTHER; note = 2'-deoxy-2'-fluorouridine-3'-phosphate
  modified_base 10: mod_base = OTHER; note = 2'-O-methyluridine-3'-phosphate
  modified_base 11: mod_base = OTHER; note = 2'-O-methylcytidine-3'-phosphate
  modified_base 12: mod_base = OTHER; note = 2'-O-methyladenosine-3'-phosphate
  modified_base 13: mod_base = OTHER; note = 2'-O-methylguanosine-3'-phosphate
  modified_base 14: mod_base = OTHER; note = 2'-deoxy-2'-fluoroguanosine-3'-phosphate
  modified_base 15: mod_base = OTHER; note = 2'-O-methylcytidine-3'-phosphate
  modified_base 16: mod_base = OTHER; note = 2'-deoxy-2'-fluorocytidine-3'-phosphate
  modified_base 17: mod_base = OTHER; note = 2'-O-methyluridine-3'-phosphate
  modified_base 18: mod_base = OTHER; note = 2'-O-methyluridine-3'-phosphate
  modified_base 19: mod_base = OTHER; note = 2'-O-methyladenosine-3'-phosphate
  modified_base 20: mod_base = OTHER; note = 2'-O-methylguanosine-3'-phosphate
  modified_base 21: mod_base = OTHER; note = 2'-O-methyladenosine-3'-phosphorothioate
  modified_base 22: mod_base = OTHER; note = 2'-O-methyluridine-3'-phosphorothioate
  modified_base 23: mod_base = OTHER; note = 2'-O-methylguanosine
aaatggttttcaggccttagatg

SEQ ID NO: 5171 - RNA, 23 nt, synthetic construct
  source 1..23: mol_type = other RNA
  modified_base 1: mod_base = OTHER; note = 2'-O-methyladenosine-3'-phosphorothioate
  modified_base 2: mod_base = OTHER; note = 2'-deoxy-2'-fluorocytidine-3'-phosphorothioate
  modified_base 3: mod_base = OTHER; note = 2'-O-methylcytidine-3'-phosphate
  modified_base 4: mod_base = OTHER; note = 2'-O-methyladenosine-3'-phosphate
  modified_base 5: mod_base = OTHER; note = 2'-O-methyluridine-3'-phosphate
  modified_base 6: mod_base = OTHER; note = 2'-deoxy-2'-fluoroadenosine-3'-phosphate
  modified_base 7: mod_base = OTHER; note = 2'-O-methyladenosine-3'-phosphate
  modified_base 8: mod_base = OTHER; note = 2'-deoxy-2'-fluoroguanosine-3'-phosphate
  modified_base 9: mod_base = OTHER; note = 2'-deoxy-2'-fluoroguanosine-3'-phosphate
  modified_base 10: mod_base = OTHER; note = 2'-O-methyladenosine-3'-phosphate
  modified_base 11: mod_base = OTHER; note = 2'-O-methyluridine-3'-phosphate
  modified_base 12: mod_base = OTHER; note = 2'-O-methylcytidine-3'-phosphate
  modified_base 13: mod_base = OTHER; note = 2'-O-methyluridine-3'-phosphate
  modified_base 14: mod_base = OTHER; note = 2'-deoxy-2'-fluorouridine-3'-phosphate
  modified_base 15: mod_base = OTHER; note = 2'-O-methyluridine-3'-phosphate
  modified_base 16: mod_base = OTHER; note = 2'-deoxy-2'-fluoroadenosine-3'-phosphate
  modified_base 17: mod_base = OTHER; note = 2'-O-methylcytidine-3'-phosphate
  modified_base 18: mod_base = OTHER; note = 2'-O-methylguanosine-3'-phosphate
  modified_base 19: mod_base = OTHER; note = 2'-O-methyluridine-3'-phosphate
  modified_base 20: mod_base = OTHER; note = 2'-O-methyladenosine-3'-phosphate
  modified_base 21: mod_base = OTHER; note = 2'-O-methyladenosine-3'-phosphorothioate
  modified_base 22: mod_base = OTHER; note = 2'-O-methyladenosine-3'-phosphorothioate
  modified_base 23: mod_base = OTHER; note = 2'-O-methyladenosine
accataaggatctttacgtaaaa

SEQ ID NO: 5172 - RNA, 23 nt, synthetic construct
  source 1..23: mol_type = other RNA
  modified_base 1: mod_base = OTHER; note = 2'-O-methyladenosine-3'-phosphorothioate
  modified_base 2: mod_base = OTHER; note = 2'-deoxy-2'-fluorocytidine-3'-phosphorothioate
  modified_base 3: mod_base = OTHER; note = 2'-O-methyluridine-3'-phosphate
  modified_base 4: mod_base = OTHER; note = 2'-O-methylguanosine-3'-phosphate
  modified_base 5: mod_base = OTHER; note = 2'-O-methylguanosine-3'-phosphate
  modified_base 6: mod_base = OTHER; note = 2'-deoxy-2'-fluorocytidine-3'-phosphate
  modified_base 7: mod_base = OTHER; note = 2'-O-methyladenosine-3'-phosphate
  modified_base 8: mod_base = OTHER; note = 2'-deoxy-2'-fluorouridine-3'-phosphate
  modified_base 9: mod_base = OTHER; note = 2'-deoxy-2'-fluorocytidine-3'-phosphate
  modified_base 10: mod_base = OTHER; note = 2'-O-methyladenosine-3'-phosphate
  modified_base 11: mod_base = OTHER; note = 2'-O-methylguanosine-3'-phosphate
  modified_base 12: mod_base = OTHER; note = 2'-O-methylcytidine-3'-phosphate
  modified_base 13: mod_base = OTHER; note = 2'-O-methyluridine-3'-phosphate
  modified_base 14: mod_base = OTHER; note = 2'-deoxy-2'-fluorouridine-3'-phosphate
  modified_base 15: mod_base = OTHER; note = 2'-O-methylcytidine-3'-phosphate
  modified_base 16: mod_base = OTHER; note = 2'-deoxy-2'-fluoroadenosine-3'-phosphate
  modified_base 17: mod_base = OTHER; note = 2'-O-methylcytidine-3'-phosphate
  modified_base 18: mod_base = OTHER; note = 2'-O-methyluridine-3'-phosphate
  modified_base 19: mod_base = OTHER; note = 2'-O-methylguanosine-3'-phosphate
  modified_base 20: mod_base = OTHER; note = 2'-O-methyluridine-3'-phosphate
  modified_base 21: mod_base = OTHER; note = 2'-O-methyladenosine-3'-phosphorothioate
  modified_base 22: mod_base = OTHER; note = 2'-O-methylguanosine-3'-phosphorothioate
  modified_base 23: mod_base = OTHER; note = 2'-O-methyluridine
actggcatcagcttcactgtagt

SEQ ID NO: 5173 - RNA, 23 nt, synthetic construct
  source 1..23: mol_type = other RNA
  modified_base 1: mod_base = OTHER; note = 2'-O-methyladenosine-3'-phosphorothioate
  modified_base 2: mod_base = OTHER; note = 2'-deoxy-2'-fluoroadenosine-3'-phosphorothioate
  modified_base 3: mod_base = OTHER; note = 2'-O-methyladenosine-3'-phosphate
  modified_base 4: mod_base = OTHER; note = 2'-O-methylcytidine-3'-phosphate
  modified_base 5: mod_base = OTHER; note = 2'-O-methyladenosine-3'-phosphate
  modified_base 6: mod_base = OTHER; note = 2'-deoxy-2'-fluoroadenosine-3'-phosphate
  modified_base 7: mod_base = OTHER; note = 2'-O-methyluridine-3'-phosphate
  modified_base 8: mod_base = OTHER; note = 2'-deoxy-2'-fluorouridine-3'-phosphate
  modified_base 9: mod_base = OTHER; note = 2'-deoxy-2'-fluorocytidine-3'-phosphate
  modified_base 10: mod_base = OTHER; note = 2'-O-methyladenosine-3'-phosphate
  modified_base 11: mod_base = OTHER; note = 2'-O-methyladenosine-3'-phosphate
  modified_base 12: mod_base = OTHER; note = 2'-O-methyluridine-3'-phosphate
  modified_base 13: mod_base = OTHER; note = 2'-O-methyluridine-3'-phosphate
  modified_base 14: mod_base = OTHER; note = 2'-deoxy-2'-fluorocytidine-3'-phosphate
  modified_base 15: mod_base = OTHER; note = 2'-O-methyladenosine-3'-phosphate
  modified_base 16: mod_base = OTHER; note = 2'-deoxy-2'-fluoroguanosine-3'-phosphate
  modified_base 17: mod_base = OTHER; note = 2'-O-methylcytidine-3'-phosphate
  modified_base 18: mod_base = OTHER; note = 2'-O-methyladenosine-3'-phosphate
  modified_base 19: mod_base = OTHER; note = 2'-O-methyladenosine-3'-phosphate
  modified_base 20: mod_base = OTHER; note = 2'-O-methyladenosine-3'-phosphate
  modified_base 21: mod_base = OTHER; note = 2'-O-methyluridine-3'-phosphorothioate
  modified_base 22: mod_base = OTHER; note = 2'-O-methyluridine-3'-phosphorothioate
  modified_base 23: mod_base = OTHER; note = 2'-O-methylcytidine
aaacaattcaattcagcaaattc

SEQ ID NO: 5174 - RNA, 23 nt, synthetic construct
  source 1..23: mol_type = other RNA
  modified_base 1: mod_base = OTHER; note = 2'-O-methyladenosine-3'-phosphorothioate
  modified_base 2: mod_base = OTHER; note = 2'-deoxy-2'-fluorouridine-3'-phosphorothioate
  modified_base 3: mod_base = OTHER; note = 2'-O-methyladenosine-3'-phosphate
  modified_base 4: mod_base = OTHER; note = 2'-O-methyladenosine-3'-phosphate
  modified_base 5: mod_base = OTHER; note = 2'-O-methylguanosine-3'-phosphate
  modified_base 6: mod_base = OTHER; note = 2'-deoxy-2'-fluorouridine-3'-phosphate
  modified_base 7: mod_base = OTHER; note = 2'-O-methylcytidine-3'-phosphate
  modified_base 8: mod_base = OTHER; note = 2'-deoxy-2'-fluorocytidine-3'-phosphate
  modified_base 9: mod_base = OTHER; note = 2'-deoxy-2'-fluoroadenosine-3'-phosphate
  modified_base 10: mod_base = OTHER; note = 2'-O-methyladenosine-3'-phosphate
  modified_base 11: mod_base = OTHER; note = 2'-O-methyladenosine-3'-phosphate
  modified_base 12: mod_base = OTHER; note = 2'-O-methylcytidine-3'-phosphate
  modified_base 13: mod_base = OTHER; note = 2'-O-methyluridine-3'-phosphate
  modified_base 14: mod_base = OTHER; note = 2'-deoxy-2'-fluoroadenosine-3'-phosphate
  modified_base 15: mod_base = OTHER; note = 2'-O-methylguanosine-3'-phosphate
  modified_base 16: mod_base = OTHER; note = 2'-deoxy-2'-fluoroadenosine-3'-phosphate
  modified_base 17: mod_base = OTHER; note = 2'-O-methylguanosine-3'-phosphate
  modified_base 18: mod_base = OTHER; note = 2'-O-methylcytidine-3'-phosphate
  modified_base 19: mod_base = OTHER; note = 2'-O-methyluridine-3'-phosphate
  modified_base 20: mod_base = OTHER; note = 2'-O-methyluridine-3'-phosphate
  modified_base 21: mod_base = OTHER; note = 2'-O-methyladenosine-3'-phosphorothioate
  modified_base 22: mod_base = OTHER; note = 2'-O-methyladenosine-3'-phosphorothioate
  modified_base 23: mod_base = OTHER; note = 2'-O-methylguanosine
ataagtccaaactagagcttaag

SEQ ID NO: 5175 - RNA, 23 nt, synthetic construct
  source 1..23: mol_type = other RNA
  modified_base 1: mod_base = OTHER; note = 2'-O-methyladenosine-3'-phosphorothioate
  modified_base 2: mod_base = OTHER; note = 2'-deoxy-2'-fluorouridine-3'-phosphorothioate
  modified_base 3: mod_base = OTHER; note = 2'-O-methylcytidine-3'-phosphate
  modified_base 4: mod_base = OTHER; note = 2'-O-methyluridine-3'-phosphate
  modified_base 5: mod_base = OTHER; note = 2'-O-methylcytidine-3'-phosphate
  modified_base 6: mod_base = OTHER; note = 2'-deoxy-2'-fluoroadenosine-3'-phosphate
  modified_base 7: mod_base = OTHER; note = 2'-O-methylcytidine-3'-phosphate
  modified_base 8: mod_base = OTHER; note = 2'-deoxy-2'-fluoroadenosine-3'-phosphate
  modified_base 9: mod_base = OTHER; note = 2'-deoxy-2'-fluorocytidine-3'-phosphate
  modified_base 10: mod_base = OTHER; note = 2'-O-methyladenosine-3'-phosphate
  modified_base 11: mod_base = OTHER; note = 2'-O-methylcytidine-3'-phosphate
  modified_base 12: mod_base = OTHER; note = 2'-O-methyluridine-3'-phosphate
  modified_base 13: mod_base = OTHER; note = 2'-O-methyladenosine-3'-phosphate
  modified_base 14: mod_base = OTHER; note = 2'-deoxy-2'-fluorocytidine-3'-phosphate
  modified_base 15: mod_base = OTHER; note = 2'-O-methyluridine-3'-phosphate
  modified_base 16: mod_base = OTHER; note = 2'-deoxy-2'-fluoroadenosine-3'-phosphate
  modified_base 17: mod_base = OTHER; note = 2'-O-methylguanosine-3'-phosphate
  modified_base 18: mod_base = OTHER; note = 2'-O-methylcytidine-3'-phosphate
  modified_base 19: mod_base = OTHER; note = 2'-O-methylcytidine-3'-phosphate
  modified_base 20: mod_base = OTHER; note = 2'-O-methyladenosine-3'-phosphate
  modified_base 21: mod_base = OTHER; note = 2'-O-methylguanosine-3'-phosphorothioate
  modified_base 22: mod_base = OTHER; note = 2'-O-methylcytidine-3'-phosphorothioate
  modified_base 23: mod_base = OTHER; note = 2'-O-methylcytidine
atctcacacactactagccagcc

SEQ ID NO: 5176 - RNA, 23 nt, synthetic construct
  source 1..23: mol_type = other RNA
  modified_base 1: mod_base = OTHER; note = 2'-O-methyladenosine-3'-phosphorothioate
  modified_base 2: mod_base = OTHER; note = 2'-deoxy-2'-fluoroguanosine-3'-phosphorothioate
  modified_base 3: mod_base = OTHER; note = 2'-O-methyladenosine-3'-phosphate
  modified_base 4: mod_base = OTHER; note = 2'-O-methyluridine-3'-phosphate
  modified_base 5: mod_base = OTHER; note = 2'-O-methyladenosine-3'-phosphate
  modified_base 6: mod_base = OTHER; note = 2'-deoxy-2'-fluoroadenosine-3'-phosphate
  modified_base 7: mod_base = OTHER; note = 2'-O-methylguanosine-3'-phosphate
  modified_base 8: mod_base = OTHER; note = 2'-deoxy-2'-fluoroadenosine-3'-phosphate
  modified_base 9: mod_base = OTHER; note = 2'-deoxy-2'-fluorouridine-3'-phosphate
  modified_base 10: mod_base = OTHER; note = 2'-O-methylguanosine-3'-phosphate
  modified_base 11: mod_base = OTHER; note = 2'-O-methyladenosine-3'-phosphate
  modified_base 12: mod_base = OTHER; note = 2'-O-methyluridine-3'-phosphate
  modified_base 13: mod_base = OTHER; note = 2'-O-methylguanosine-3'-phosphate
  modified_base 14: mod_base = OTHER; note = 2'-deoxy-2'-fluorocytidine-3'-phosphate
  modified_base 15: mod_base = OTHER; note = 2'-O-methyladenosine-3'-phosphate
  modified_base 16: mod_base = OTHER; note = 2'-deoxy-2'-fluorouridine-3'-phosphate
  modified_base 17: mod_base = OTHER; note = 2'-O-methylcytidine-3'-phosphate
  modified_base 18: mod_base = OTHER; note = 2'-O-methyladenosine-3'-phosphate
  modified_base 19: mod_base = OTHER; note = 2'-O-methylcytidine-3'-phosphate
  modified_base 20: mod_base = OTHER; note = 2'-O-methyladenosine-3'-phosphate
  modified_base 21: mod_base = OTHER; note = 2'-O-methyluridine-3'-phosphorothioate
  modified_base 22: mod_base = OTHER; note = 2'-O-methyladenosine-3'-phosphorothioate
  modified_base 23: mod_base = OTHER; note = 2'-O-methyluridine
agataagatgatgcatcacatat

SEQ ID NO: 5177 - RNA, 23 nt, synthetic construct
  source 1..23: mol_type = other RNA
  modified_base 1: mod_base = OTHER; note = 2'-O-methyladenosine-3'-phosphorothioate
  modified_base 2: mod_base = OTHER; note = 2'-deoxy-2'-fluoroadenosine-3'-phosphorothioate
  modified_base 3: mod_base = OTHER; note = 2'-O-methylcytidine-3'-phosphate
  modified_base 4: mod_base = OTHER; note = 2'-O-methyladenosine-3'-phosphate
  modified_base 5: mod_base = OTHER; note = 2'-O-methyluridine-3'-phosphate
  modified_base 6: mod_base = OTHER; note = 2'-deoxy-2'-fluoroadenosine-3'-phosphate
  modified_base 7: mod_base = OTHER; note = 2'-O-methyluridine-3'-phosphate
  modified_base 8: mod_base = OTHER; note = 2'-deoxy-2'-fluoroguanosine-3'-phosphate
  modified_base 9: mod_base = OTHER; note = 2'-deoxy-2'-fluorocytidine-3'-phosphate
  modified_base 10: mod_base = OTHER; note = 2'-O-methyladenosine-3'-phosphate
  modified_base 11: mod_base = OTHER; note = 2'-O-methyluridine-3'-phosphate
  modified_base 12: mod_base = OTHER; note = 2'-O-methyluridine-3'-phosphate
  modified_base 13: mod_base = OTHER; note = 2'-O-methyladenosine-3'-phosphate
  modified_base 14: mod_base = OTHER; note = 2'-deoxy-2'-fluorocytidine-3'-phosphate
  modified_base 15: mod_base = OTHER; note = 2'-O-methyladenosine-3'-phosphate
  modified_base 16: mod_base = OTHER; note = 2'-deoxy-2'-fluorouridine-3'-phosphate
  modified_base 17: mod_base = OTHER; note = 2'-O-methylguanosine-3'-phosphate
  modified_base 18: mod_base = OTHER; note = 2'-O-methyluridine-3'-phosphate
  modified_base 19: mod_base = OTHER; note = 2'-O-methyladenosine-3'-phosphate
  modified_base 20: mod_base = OTHER; note = 2'-O-methylguanosine-3'-phosphate
  modified_base 21: mod_base = OTHER; note = 2'-O-methylguanosine-3'-phosphorothioate
  modified_base 22: mod_base = OTHER; note = 2'-O-methyladenosine-3'-phosphorothioate
  modified_base 23: mod_base = OTHER; note = 2'-O-methylcytidine
aacatatgcattacatgtaggac

SEQ ID NO: 5178 - RNA, 23 nt, synthetic construct
  source 1..23: mol_type = other RNA
  modified_base 1: mod_base = OTHER; note = 2'-O-methyladenosine-3'-phosphorothioate
  modified_base 2: mod_base = OTHER; note = 2'-deoxy-2'-fluorocytidine-3'-phosphorothioate
  modified_base 3: mod_base = OTHER; note = 2'-O-methyladenosine-3'-phosphate
  modified_base 4: mod_base = OTHER; note = 2'-O-methyladenosine-3'-phosphate
  modified_base 5: mod_base = OTHER; note = 2'-O-methylcytidine-3'-phosphate
  modified_base 6: mod_base = OTHER; note = 2'-deoxy-2'-fluoroadenosine-3'-phosphate
  modified_base 7: mod_base = OTHER; note = 2'-O-methyladenosine-3'-phosphate
  modified_base 8: mod_base = OTHER; note = 2'-deoxy-2'-fluoroadenosine-3'-phosphate
  modified_base 9: mod_base = OTHER; note = 2'-deoxy-2'-fluorocytidine-3'-phosphate
  modified_base 10: mod_base = OTHER; note = 2'-O-methyluridine-3'-phosphate
  modified_base 11: mod_base = OTHER; note = 2'-O-methylcytidine-3'-phosphate
  modified_base 12: mod_base = OTHER; note = 2'-O-methyluridine-3'-phosphate
  modified_base 13: mod_base = OTHER; note = 2'-O-methyluridine-3'-phosphate
  modified_base 14: mod_base = OTHER; note = 2'-deoxy-2'-fluoroguanosine-3'-phosphate
  modified_base 15: mod_base = OTHER; note = 2'-O-methylguanosine-3'-phosphate
  modified_base 16: mod_base = OTHER; note = 2'-deoxy-2'-fluorocytidine-3'-phosphate
  modified_base 17: mod_base = OTHER; note = 2'-O-methyluridine-3'-phosphate
  modified_base 18: mod_base = OTHER; note = 2'-O-methylguanosine-3'-phosphate
  modified_base 19: mod_base = OTHER; note = 2'-O-methylcytidine-3'-phosphate
  modified_base 20: mod_base = OTHER; note = 2'-O-methyluridine-3'-phosphate
  modified_base 21: mod_base = OTHER; note = 2'-O-methylguanosine-3'-phosphorothioate
  modified_base 22: mod_base = OTHER; note = 2'-O-methyladenosine-3'-phosphorothioate
  modified_base 23: mod_base = OTHER; note = 2'-O-methylguanosine
acaacaaactcttggctgctgag

SEQ ID NO: 5179 - RNA, 23 nt, synthetic construct
  source 1..23: mol_type = other RNA
  modified_base 1: mod_base = OTHER; note = 2'-O-methyladenosine-3'-phosphorothioate
  modified_base 2: mod_base = OTHER; note = 2'-deoxy-2'-fluorocytidine-3'-phosphorothioate
  modified_base 3: mod_base = OTHER; note = 2'-O-methyladenosine-3'-phosphate
  modified_base 4: mod_base = OTHER; note = 2'-O-methyluridine-3'-phosphate
  modified_base 5: mod_base = OTHER; note = 2'-O-methylguanosine-3'-phosphate
  modified_base 6: mod_base = OTHER; note = 2'-deoxy-2'-fluorouridine-3'-phosphate
  modified_base 7: mod_base = OTHER; note = 2'-O-methylguanosine-3'-phosphate
  modified_base 8: mod_base = OTHER; note = 2'-deoxy-2'-fluoroadenosine-3'-phosphate
  modified_base 9: mod_base = OTHER; note = 2'-deoxy-2'-fluoroadenosine-3'-phosphate
  modified_base 10: mod_base = OTHER; note = 2'-O-methylguanosine-3'-phosphate
  modified_base 11: mod_base = OTHER; note = 2'-O-methylguanosine-3'-phosphate
  modified_base 12: mod_base = OTHER; note = 2'-O-methylcytidine-3'-phosphate
  modified_base 13: mod_base = OTHER; note = 2'-O-methyluridine-3'-phosphate
  modified_base 14: mod_base = OTHER; note = 2'-deoxy-2'-fluoroguanosine-3'-phosphate
  modified_base 15: mod_base = OTHER; note = 2'-O-methylguanosine-3'-phosphate
  modified_base 16: mod_base = OTHER; note = 2'-deoxy-2'-fluoroadenosine-3'-phosphate
  modified_base 17: mod_base = OTHER; note = 2'-O-methyluridine-3'-phosphate
  modified_base 18: mod_base = OTHER; note = 2'-O-methyluridine-3'-phosphate
  modified_base 19: mod_base = OTHER; note = 2'-O-methylguanosine-3'-phosphate
  modified_base 20: mod_base = OTHER; note = 2'-O-methylguanosine-3'-phosphate
  modified_base 21: mod_base = OTHER; note = 2'-O-methyladenosine-3'-phosphorothioate
  modified_base 22: mod_base = OTHER; note = 2'-O-methylguanosine-3'-phosphorothioate
  modified_base 23: mod_base = OTHER; note = 2'-O-methylguanosine
acatgtgaaggctggattggagg

SEQ ID NO: 5180 - RNA, 23 nt, synthetic construct
  source 1..23: mol_type = other RNA
  modified_base 1: mod_base = OTHER; note = 2'-O-methyladenosine-3'-phosphorothioate
  modified_base 2: mod_base = OTHER; note = 2'-deoxy-2'-fluoroguanosine-3'-phosphorothioate
  modified_base 3: mod_base = OTHER; note = 2'-O-methylcytidine-3'-phosphate
  modified_base 4: mod_base = OTHER; note = 2'-O-methyluridine-3'-phosphate
  modified_base 5: mod_base = OTHER; note = 2'-O-methyluridine-3'-phosphate
  modified_base 6: mod_base = OTHER; note = 2'-deoxy-2'-fluoroguanosine-3'-phosphate
  modified_base 7: mod_base = OTHER; note = 2'-O-methyladenosine-3'-phosphate
  modified_base 8: mod_base = OTHER; note = 2'-deoxy-2'-fluorouridine-3'-phosphate
  modified_base 9: mod_base = OTHER; note = 2'-deoxy-2'-fluoroguanosine-3'-phosphate
  modified_base 10: mod_base = OTHER; note = 2'-O-methylguanosine-3'-phosphate
  modified_base 11: mod_base = OTHER; note = 2'-O-methylguanosine-3'-phosphate
  modified_base 12: mod_base = OTHER; note = 2'-O-methyluridine-3'-phosphate
  modified_base 13: mod_base = OTHER; note = 2'-O-methyladenosine-3'-phosphate
  modified_base 14: mod_base = OTHER; note = 2'-deoxy-2'-fluorocytidine-3'-phosphate
  modified_base 15: mod_base = OTHER; note = 2'-O-methyluridine-3'-phosphate
  modified_base 16: mod_base = OTHER; note = 2'-deoxy-2'-fluoroguanosine-3'-phosphate
  modified_base 17: mod_base = OTHER; note = 2'-O-methyluridine-3'-phosphate
  modified_base 18: mod_base = OTHER; note = 2'-O-methyluridine-3'-phosphate
  modified_base 19: mod_base = OTHER; note = 2'-O-methylguanosine-3'-phosphate
  modified_base 20: mod_base = OTHER; note = 2'-O-methylguanosine-3'-phosphate
  modified_base 21: mod_base = OTHER; note = 2'-O-methyluridine-3'-phosphorothioate
  modified_base 22: mod_base = OTHER; note = 2'-O-methylguanosine-3'-phosphorothioate
  modified_base 23: mod_base = OTHER; note = 2'-O-methyladenosine
agcttgatgggtactgttggtga

SEQ ID NO: 5181 - RNA, 23 nt, synthetic construct
  source 1..23: mol_type = other RNA
  modified_base 1: mod_base = OTHER; note = 2'-O-methyladenosine-3'-phosphorothioate
  modified_base 2: mod_base = OTHER; note = 2'-deoxy-2'-fluorouridine-3'-phosphorothioate
  modified_base 3: mod_base = OTHER; note = 2'-O-methyluridine-3'-phosphate
  modified_base 4: mod_base = OTHER; note = 2'-O-methyluridine-3'-phosphate
  modified_base 5: mod_base = OTHER; note = 2'-O-methylcytidine-3'-phosphate
  modified_base 6: mod_base = OTHER; note = 2'-deoxy-2'-fluorouridine-3'-phosphate
  modified_base 7: mod_base = OTHER; note = 2'-O-methylguanosine-3'-phosphate
  modified_base 8: mod_base = OTHER; note = 2'-deoxy-2'-fluoroadenosine-3'-phosphate
  modified_base 9: mod_base = OTHER; note = 2'-deoxy-2'-fluorouridine-3'-phosphate
  modified_base 10: mod_base = OTHER; note = 2'-O-methylguanosine-3'-phosphate
  modified_base 11: mod_base = OTHER; note = 2'-O-methyladenosine-3'-phosphate
  modified_base 12: mod_base = OTHER; note = 2'-O-methyluridine-3'-phosphate
  modified_base 13: mod_base = OTHER; note = 2'-O-methylcytidine-3'-phosphate
  modified_base 14: mod_base = OTHER; note = 2'-deoxy-2'-fluorocytidine-3'-phosphate
  modified_base 15: mod_base = OTHER; note = 2'-O-methylcytidine-3'-phosphate
  modified_base 16: mod_base = OTHER; note = 2'-deoxy-2'-fluorouridine-3'-phosphate
  modified_base 17: mod_base = OTHER; note = 2'-O-methyladenosine-3'-phosphate
  modified_base 18: mod_base = OTHER; note = 2'-O-methylguanosine-3'-phosphate
  modified_base 19: mod_base = OTHER; note = 2'-O-methylcytidine-3'-phosphate
  modified_base 20: mod_base = OTHER; note = 2'-O-methyladenosine-3'-phosphate
  modified_base 21: mod_base = OTHER; note = 2'-O-methylguanosine-3'-phosphorothioate
  modified_base 22: mod_base = OTHER; note = 2'-O-methyladenosine-3'-phosphorothioate
  modified_base 23: mod_base = OTHER; note = 2'-O-methyladenosine
atttctgatgatccctagcagaa

SEQ ID NO: 5182 - RNA, 23 nt, synthetic construct
  source 1..23: mol_type = other RNA
  modified_base 1: mod_base = OTHER; note = 2'-O-methyladenosine-3'-phosphorothioate
  modified_base 2: mod_base = OTHER; note = 2'-deoxy-2'-fluoroguanosine-3'-phosphorothioate
  modified_base 3: mod_base = OTHER; note = 2'-O-methylcytidine-3'-phosphate
  modified_base 4: mod_base = OTHER; note = 2'-O-methyluridine-3'-phosphate
  modified_base 5: mod_base = OTHER; note = 2'-O-methyluridine-3'-phosphate
  modified_base 6: mod_base = OTHER; note = 2'-deoxy-2'-fluorouridine-3'-phosphate
  modified_base 7: mod_base = OTHER; note = 2'-O-methyladenosine-3'-phosphate
  modified_base 8: mod_base = OTHER; note = 2'-deoxy-2'-fluorouridine-3'-phosphate
  modified_base 9: mod_base = OTHER; note = 2'-deoxy-2'-fluoroguanosine-3'-phosphate
  modified_base 10: mod_base = OTHER; note = 2'-O-methyluridine-3'-phosphate
  modified_base 11: mod_base = OTHER; note = 2'-O-methylguanosine-3'-phosphate
  modified_base 12: mod_base = OTHER; note = 2'-O-methylguanosine-3'-phosphate
  modified_base 13: mod_base = OTHER; note = 2'-O-methyluridine-3'-phosphate
  modified_base 14: mod_base = OTHER; note = 2'-deoxy-2'-fluoroadenosine-3'-phosphate
  modified_base 15: mod_base = OTHER; note = 2'-O-methylguanosine-3'-phosphate
  modified_base 16: mod_base = OTHER; note = 2'-deoxy-2'-fluorocytidine-3'-phosphate
  modified_base 17: mod_base = OTHER; note = 2'-O-methyladenosine-3'-phosphate
  modified_base 18: mod_base = OTHER; note = 2'-O-methyladenosine-3'-phosphate
  modified_base 19: mod_base = OTHER; note = 2'-O-methyladenosine-3'-phosphate
  modified_base 20: mod_base = OTHER; note = 2'-O-methylcytidine-3'-phosphate
  modified_base 21: mod_base = OTHER; note = 2'-O-methylcytidine-3'-phosphorothioate
  modified_base 22: mod_base = OTHER; note = 2'-O-methyladenosine-3'-phosphorothioate
  modified_base 23: mod_base = OTHER; note = 2'-O-methyladenosine
agctttatgtggtagcaaaccaa

SEQ ID NO: 5183 - RNA, 23 nt, synthetic construct
  source 1..23: mol_type = other RNA
  modified_base 1: mod_base = OTHER; note = 2'-O-methyladenosine-3'-phosphorothioate
  modified_base 2: mod_base = OTHER; note = 2'-deoxy-2'-fluoroguanosine-3'-phosphorothioate
  modified_base 3: mod_base = OTHER; note = 2'-O-methylguanosine-3'-phosphate
  modified_base 4: mod_base = OTHER; note = 2'-O-methyladenosine-3'-phosphate
  modified_base 5: mod_base = OTHER; note = 2'-O-methylguanosine-3'-phosphate
  modified_base 6: mod_base = OTHER; note = 2'-deoxy-2'-fluorocytidine-3'-phosphate
  modified_base 7: mod_base = OTHER; note = 2'-O-methyladenosine-3'-phosphate
  modified_base 8: mod_base = OTHER; note = 2'-deoxy-2'-fluorouridine-3'-phosphate
  modified_base 9: mod_base = OTHER; note = 2'-deoxy-2'-fluoroguanosine-3'-phosphate
  modified_base 10: mod_base = OTHER; note = 2'-O-methyladenosine-3'-phosphate
  modified_base 11: mod_base = OTHER; note = 2'-O-methyluridine-3'-phosphate
  modified_base 12: mod_base = OTHER; note = 2'-O-methylguanosine-3'-phosphate
  modified_base 13: mod_base = OTHER; note = 2'-O-methylcytidine-3'-phosphate
  modified_base 14: mod_base = OTHER; note = 2'-deoxy-2'-fluorouridine-3'-phosphate
  modified_base 15: mod_base = OTHER; note = 2'-O-methylguanosine-3'-phosphate
  modified_base 16: mod_base = OTHER; note = 2'-deoxy-2'-fluorouridine-3'-phosphate
  modified_base 17: mod_base = OTHER; note = 2'-O-methyladenosine-3'-phosphate
  modified_base 18: mod_base = OTHER; note = 2'-O-methylcytidine-3'-phosphate
  modified_base 19: mod_base = OTHER; note = 2'-O-methyladenosine-3'-phosphate
  modified_base 20: mod_base = OTHER; note = 2'-O-methylcytidine-3'-phosphate
  modified_base 21: mod_base = OTHER; note = 2'-O-methyluridine-3'-phosphorothioate
  modified_base 22: mod_base = OTHER; note = 2'-O-methylguanosine-3'-phosphorothioate
  modified_base 23: mod_base = OTHER; note = 2'-O-methyladenosine
aggagcatgatgctgtacactga

SEQ ID NO: 5184 - RNA, 23 nt, synthetic construct
  source 1..23: mol_type = other RNA
  modified_base 1: mod_base = OTHER; note = 2'-O-methyladenosine-3'-phosphorothioate
  modified_base 2: mod_base = OTHER; note = 2'-deoxy-2'-fluoroguanosine-3'-phosphorothioate
  modified_base 3: mod_base = OTHER; note = 2'-O-methylcytidine-3'-phosphate
  modified_base 4: mod_base = OTHER; note = 2'-O-methyladenosine-3'-phosphate
  modified_base 5: mod_base = OTHER; note = 2'-O-methylguanosine-3'-phosphate
  modified_base 6: mod_base = OTHER; note = 2'-deoxy-2'-fluoroguanosine-3'-phosphate
  modified_base 7: mod_base = OTHER; note = 2'-O-methyluridine-3'-phosphate
  modified_base 8: mod_base = OTHER; note = 2'-deoxy-2'-fluorouridine-3'-phosphate
  modified_base 9: mod_base = OTHER; note = 2'-deoxy-2'-fluoroguanosine-3'-phosphate
  modified_base 10: mod_base = OTHER; note = 2'-O-methyluridine-3'-phosphate
  modified_base 11: mod_base = OTHER; note = 2'-O-methylguanosine-3'-phosphate
  modified_base 12: mod_base = OTHER; note = 2'-O-methylguanosine-3'-phosphate
  modified_base 13: mod_base = OTHER; note = 2'-O-methyluridine-3'-phosphate
  modified_base 14: mod_base = OTHER; note = 2'-deoxy-2'-fluorocytidine-3'-phosphate
  modified_base 15: mod_base = OTHER; note = 2'-O-methylguanosine-3'-phosphate
  modified_base 16: mod_base = OTHER; note = 2'-deoxy-2'-fluoroadenosine-3'-phosphate
  modified_base 17: mod_base = OTHER; note = 2'-O-methyladenosine-3'-phosphate
  modified_base 18: mod_base = OTHER; note = 2'-O-methylguanosine-3'-phosphate
  modified_base 19: mod_base = OTHER; note = 2'-O-methylcytidine-3'-phosphate
  modified_base 20: mod_base = OTHER; note = 2'-O-methylcytidine-3'-phosphate
  modified_base 21: mod_base = OTHER; note = 2'-O-methyladenosine-3'-phosphorothioate
  modified_base 22: mod_base = OTHER; note = 2'-O-methyluridine-3'-phosphorothioate
  modified_base 23: mod_base = OTHER; note = 2'-O-methylcytidine
agcaggttgtggtcgaagccatc

SEQ ID NO: 5185 - RNA, 23 nt, synthetic construct
  source 1..23: mol_type = other RNA
  modified_base 1: mod_base = OTHER; note = 2'-O-methyladenosine-3'-phosphorothioate
  modified_base 2: mod_base = OTHER; note = 2'-deoxy-2'-fluorocytidine-3'-phosphorothioate
  modified_base 3: mod_base = OTHER; note = 2'-O-methyluridine-3'-phosphate
  modified_base 4: mod_base = OTHER; note = 2'-O-methylguanosine-3'-phosphate
  modified_base 5: mod_base = OTHER; note = 2'-O-methylcytidine-3'-phosphate
  modified_base 6: mod_base = OTHER; note = 2'-deoxy-2'-fluorouridine-3'-phosphate
  modified_base 7: mod_base = OTHER; note = 2'-O-methylguanosine-3'-phosphate
  modified_base 8: mod_base = OTHER; note = 2'-deoxy-2'-fluoroadenosine-3'-phosphate
  modified_base 9: mod_base = OTHER; note = 2'-deoxy-2'-fluoroadenosine-3'-phosphate
  modified_base 10: mod_base = OTHER; note = 2'-O-methyluridine-3'-phosphate
  modified_base 11: mod_base = OTHER; note = 2'-O-methylguanosine-3'-phosphate
  modified_base 12: mod_base = OTHER; note = 2'-O-methylcytidine-3'-phosphate
  modified_base 13: mod_base = OTHER; note = 2'-O-methyladenosine-3'-phosphate
  modified_base 14: mod_base = OTHER; note = 2'-deoxy-2'-fluoroadenosine-3'-phosphate
  modified_base 15: mod_base = OTHER; note = 2'-O-methyluridine-3'-phosphate
  modified_base 16: mod_base = OTHER; note = 2'-deoxy-2'-fluoroguanosine-3'-phosphate
  modified_base 17: mod_base = OTHER; note = 2'-O-methyladenosine-3'-phosphate
  modified_base 18: mod_base = OTHER; note = 2'-O-methylcytidine-3'-phosphate
  modified_base 19: mod_base = OTHER; note = 2'-O-methyluridine-3'-phosphate
  modified_base 20: mod_base = OTHER; note = 2'-O-methylguanosine-3'-phosphate
  modified_base 21: mod_base = OTHER; note = 2'-O-methylguanosine-3'-phosphorothioate
  modified_base 22: mod_base = OTHER; note = 2'-O-methylcytidine-3'-phosphorothioate
  modified_base 23: mod_base = OTHER; note = 2'-O-methyladenosine
actgctgaatgcaatgactggca

SEQ ID NO: 5186 - RNA, 23 nt, synthetic construct
  source 1..23: mol_type = other RNA
  modified_base 1: mod_base = OTHER; note = 2'-O-methyladenosine-3'-phosphorothioate
  modified_base 2: mod_base = OTHER; note = 2'-deoxy-2'-fluorocytidine-3'-phosphorothioate
  modified_base 3: mod_base = OTHER; note = 2'-O-methyluridine-3'-phosphate
  modified_base 4: mod_base = OTHER; note = 2'-O-methylguanosine-3'-phosphate
  modified_base 5: mod_base = OTHER; note = 2'-O-methyluridine-3'-phosphate
  modified_base 6: mod_base = OTHER; note = 2'-deoxy-2'-fluorocytidine-3'-phosphate
  modified_base 7: mod_base = OTHER; note = 2'-O-methyluridine-3'-phosphate
  modified_base 8: mod_base = OTHER; note = 2'-deoxy-2'-fluoroguanosine-3'-phosphate
  modified_base 9: mod_base = OTHER; note = 2'-deoxy-2'-fluorouridine-3'-phosphate
  modified_base 10: mod_base = OTHER; note = 2'-O-methylguanosine-3'-phosphate
  modified_base 11: mod_base = OTHER; note = 2'-O-methylcytidine-3'-phosphate
  modified_base 12: mod_base = OTHER; note = 2'-O-methyladenosine-3'-phosphate
  modified_base 13: mod_base = OTHER; note = 2'-O-methyluridine-3'-phosphate
  modified_base 14: mod_base = OTHER; note = 2'-deoxy-2'-fluorocytidine-3'-phosphate
  modified_base 15: mod_base = OTHER; note = 2'-O-methyladenosine-3'-phosphate
  modified_base 16: mod_base = OTHER; note = 2'-deoxy-2'-fluorouridine-3'-phosphate
  modified_base 17: mod_base = OTHER; note = 2'-O-methylguanosine-3'-phosphate
  modified_base 18: mod_base = OTHER; note = 2'-O-methylguanosine-3'-phosphate
  modified_base 19: mod_base = OTHER; note = 2'-O-methyladenosine-3'-phosphate
  modified_base 20: mod_base = OTHER; note = 2'-O-methyladenosine-3'-phosphate
  modified_base 21: mod_base = OTHER; note = 2'-O-methylguanosine-3'-phosphorothioate
  modified_base 22: mod_base = OTHER; note = 2'-O-methylcytidine-3'-phosphorothioate
  modified_base 23: mod_base = OTHER; note = 2'-O-methyladenosine
actgtctgtgcatcatggaagca

SEQ ID NO: 5187 - RNA, 23 nt, synthetic construct
  source 1..23: mol_type = other RNA
  modified_base 1: mod_base = OTHER; note = 2'-O-methyladenosine-3'-phosphorothioate
  modified_base 2: mod_base = OTHER; note = 2'-deoxy-2'-fluoroadenosine-3'-phosphorothioate
  modified_base 3: mod_base = OTHER; note = 2'-O-methyluridine-3'-phosphate
  modified_base 4: mod_base = OTHER; note = 2'-O-methylcytidine-3'-phosphate
  modified_base 5: mod_base = OTHER; note = 2'-O-methyladenosine-3'-phosphate
  modified_base 6: mod_base = OTHER; note = 2'-deoxy-2'-fluoroadenosine-3'-phosphate
  modified_base 7: mod_base = OTHER; note = 2'-O-methylguanosine-3'-phosphate
  modified_base 8: mod_base = OTHER; note = 2'-deoxy-2'-fluorouridine-3'-phosphate
  modified_base 9: mod_base = OTHER; note = 2'-deoxy-2'-fluorouridine-3'-phosphate
  modified_base 10: mod_base = OTHER; note = 2'-O-methylguanosine-3'-phosphate
  modified_base 11: mod_base = OTHER; note = 2'-O-methylguanosine-3'-phosphate
  modified_base 12: mod_base = OTHER; note = 2'-O-methyluridine-3'-phosphate
  modified_base 13: mod_base = OTHER; note = 2'-O-methyladenosine-3'-phosphate
  modified_base 14: mod_base = OTHER; note = 2'-deoxy-2'-fluorouridine-3'-phosphate
  modified_base 15: mod_base = OTHER; note = 2'-O-methylcytidine-3'-phosphate
  modified_base 16: mod_base = OTHER; note = 2'-deoxy-2'-fluorocytidine-3'-phosphate
  modified_base 17: mod_base = OTHER; note = 2'-O-methyluridine-3'-phosphate
  modified_base 18: mod_base = OTHER; note = 2'-O-methylcytidine-3'-phosphate
  modified_base 19: mod_base = OTHER; note = 2'-O-methylcytidine-3'-phosphate
  modified_base 20: mod_base = OTHER; note = 2'-O-methyluridine-3'-phosphate
  modified_base 21: mod_base = OTHER; note = 2'-O-methylguanosine-3'-phosphorothioate
  modified_base 22: mod_base = OTHER; note = 2'-O-methylguanosine-3'-phosphorothioate
  modified_base 23: mod_base = OTHER; note = 2'-O-methylcytidine
aatcaagttggtatcctcctggc

SEQ ID NO: 5188 - RNA, 23 nt, synthetic construct
  source 1..23: mol_type = other RNA
  modified_base 1: mod_base = OTHER; note = 2'-O-methyladenosine-3'-phosphorothioate
  modified_base 2: mod_base = OTHER; note = 2'-deoxy-2'-fluorouridine-3'-phosphorothioate
  modified_base 3: mod_base = OTHER; note = 2'-O-methyluridine-3'-phosphate
  modified_base 4: mod_base = OTHER; note = 2'-O-methylguanosine-3'-phosphate
  modified_base 5: mod_base = OTHER; note = 2'-O-methyladenosine-3'-phosphate
  modified_base 6: mod_base = OTHER; note = 2'-deoxy-2'-fluorocytidine-3'-phosphate
  modified_base 7: mod_base = OTHER; note = 2'-O-methyluridine-3'-phosphate
  modified_base 8: mod_base = OTHER; note = 2'-deoxy-2'-fluorocytidine-3'-phosphate
  modified_base 9: mod_base = OTHER; note = 2'-deoxy-2'-fluorocytidine-3'-phosphate
  modified_base 10: mod_base = OTHER; note = 2'-O-methyluridine-3'-phosphate
  modified_base 11: mod_base = OTHER; note = 2'-O-methyluridine-3'-phosphate
  modified_base 12: mod_base = OTHER; note = 2'-O-methylguanosine-3'-phosphate
  modified_base 13: mod_base = OTHER; note = 2'-O-methyluridine-3'-phosphate
  modified_base 14: mod_base = OTHER; note = 2'-deoxy-2'-fluorouridine-3'-phosphate
  modified_base 15: mod_base = OTHER; note = 2'-O-methyluridine-3'-phosphate
  modified_base 16: mod_base = OTHER; note = 2'-deoxy-2'-fluorocytidine-3'-phosphate
  modified_base 17: mod_base = OTHER; note = 2'-O-methylcytidine-3'-phosphate
  modified_base 18: mod_base = OTHER; note = 2'-O-methyladenosine-3'-phosphate
  modified_base 19: mod_base = OTHER; note = 2'-O-methyluridine-3'-phosphate
  modified_base 20: mod_base = OTHER; note = 2'-O-methylcytidine-3'-phosphate
  modified_base 21: mod_base = OTHER; note = 2'-O-methyladenosine-3'-phosphorothioate
  modified_base 22: mod_base = OTHER; note = 2'-O-methylguanosine-3'-phosphorothioate
  modified_base 23: mod_base = OTHER; note = 2'-O-methylguanosine
attgactccttgtttccatcagg

SEQ ID NO: 5189 - RNA, 23 nt, synthetic construct
  source 1..23: mol_type = other RNA
  modified_base 1: mod_base = OTHER; note = 2'-O-methyladenosine-3'-phosphorothioate
  modified_base 2: mod_base = OTHER; note = 2'-deoxy-2'-fluoroadenosine-3'-phosphorothioate
  modified_base 3: mod_base = OTHER; note = 2'-O-methyladenosine-3'-phosphate
  modified_base 4: mod_base = OTHER; note = 2'-O-methyladenosine-3'-phosphate
  modified_base 5: mod_base = OTHER; note = 2'-O-methylcytidine-3'-phosphate
  modified_base 6: mod_base = OTHER; note = 2'-deoxy-2'-fluorocytidine-3'-phosphate
  modified_base 7: mod_base = OTHER; note = 2'-O-methyladenosine-3'-phosphate
  modified_base 8: mod_base = OTHER; note = 2'-deoxy-2'-fluoroadenosine-3'-phosphate
  modified_base 9: mod_base = OTHER; note = 2'-deoxy-2'-fluorocytidine-3'-phosphate
  modified_base 10: mod_base = OTHER; note = 2'-O-methyluridine-3'-phosphate
  modified_base 11: mod_base = OTHER; note = 2'-O-methylguanosine-3'-phosphate
  modified_base 12: mod_base = OTHER; note = 2'-O-methyladenosine-3'-phosphate
  modified_base 13: mod_base = OTHER; note = 2'-O-methyluridine-3'-phosphate
  modified_base 14: mod_base = OTHER; note = 2'-deoxy-2'-fluorouridine-3'-phosphate
  modified_base 15: mod_base = OTHER; note = 2'-O-methylcytidine-3'-phosphate
  modified_base 16: mod_base = OTHER; note = 2'-deoxy-2'-fluorouridine-3'-phosphate
  modified_base 17: mod_base = OTHER; note = 2'-O-methyluridine-3'-phosphate
  modified_base 18: mod_base = OTHER; note = 2'-O-methylguanosine-3'-phosphate
  modified_base 19: mod_base = OTHER; note = 2'-O-methylcytidine-3'-phosphate
  modified_base 20: mod_base = OTHER; note = 2'-O-methyluridine-3'-phosphate
  modified_base 21: mod_base = OTHER; note = 2'-O-methyluridine-3'-phosphorothioate
  modified_base 22: mod_base = OTHER; note = 2'-O-methylcytidine-3'-phosphorothioate
  modified_base 23: mod_base = OTHER; note = 2'-O-methyluridine
aaaaccaactgattcttgcttct

SEQ ID NO: 5190 - RNA, 23 nt, synthetic construct
  source 1..23: mol_type = other RNA
  modified_base 1: mod_base = OTHER; note = 2'-O-methyladenosine-3'-phosphorothioate
  modified_base 2: mod_base = OTHER; note = 2'-deoxy-2'-fluoroguanosine-3'-phosphorothioate
  modified_base 3: mod_base = OTHER; note = 2'-O-methylguanosine-3'-phosphate
  modified_base 4: mod_base = OTHER; note = 2'-O-methyladenosine-3'-phosphate
  modified_base 5: mod_base = OTHER; note = 2'-O-methylcytidine-3'-phosphate
  modified_base 6: mod_base = OTHER; note = 2'-deoxy-2'-fluoroguanosine-3'-phosphate
  modified_base 7: mod_base = OTHER; note = 2'-O-methyladenosine-3'-phosphate
  modified_base 8: mod_base = OTHER; note = 2'-deoxy-2'-fluoroguanosine-3'-phosphate
  modified_base 9: mod_base = OTHER; note = 2'-deoxy-2'-fluorouridine-3'-phosphate
  modified_base 10: mod_base = OTHER; note = 2'-O-methylguanosine-3'-phosphate
  modified_base 11: mod_base = OTHER; note = 2'-O-methylguanosine-3'-phosphate
  modified_base 12: mod_base = OTHER; note = 2'-O-methylcytidine-3'-phosphate
  modified_base 13: mod_base = OTHER; note = 2'-O-methyladenosine-3'-phosphate
  modified_base 14: mod_base = OTHER; note = 2'-deoxy-2'-fluoroadenosine-3'-phosphate
  modified_base 15: mod_base = OTHER; note = 2'-O-methylguanosine-3'-phosphate
  modified_base 16: mod_base = OTHER; note = 2'-deoxy-2'-fluorocytidine-3'-phosphate
  modified_base 17: mod_base = OTHER; note = 2'-O-methyladenosine-3'-phosphate
  modified_base 18: mod_base = OTHER; note = 2'-O-methylguanosine-3'-phosphate
  modified_base 19: mod_base = OTHER; note = 2'-O-methyluridine-3'-phosphate
  modified_base 20: mod_base = OTHER; note = 2'-O-methyluridine-3'-phosphate
  modified_base 21: mod_base = OTHER; note = 2'-O-methylguanosine-3'-phosphorothioate
  modified_base 22: mod_base = OTHER; note = 2'-O-methylcytidine-3'-phosphorothioate
  modified_base 23: mod_base = OTHER; note = 2'-O-methylguanosine
aggacgagtggcaagcagttgcg

SEQ ID NO: 5191 - RNA, 23 nt, synthetic construct
  source 1..23: mol_type = other RNA
  modified_base 1: mod_base = OTHER; note = 2'-O-methyladenosine-3'-phosphorothioate
  modified_base 2: mod_base = OTHER; note = 2'-deoxy-2'-fluorocytidine-3'-phosphorothioate
  modified_base 3: mod_base = OTHER; note = 2'-O-methyluridine-3'-phosphate
  modified_base 4: mod_base = OTHER; note = 2'-O-methyladenosine-3'-phosphate
  modified_base 5: mod_base = OTHER; note = 2'-O-methylcytidine-3'-phosphate
  modified_base 6: mod_base = OTHER; note = 2'-deoxy-2'-fluoroadenosine-3'-phosphate
  modified_base 7: mod_base = OTHER; note = 2'-O-methylguanosine-3'-phosphate
  modified_base 8: mod_base = OTHER; note = 2'-deoxy-2'-fluorouridine-3'-phosphate
  modified_base 9: mod_base = OTHER; note = 2'-deoxy-2'-fluoroadenosine-3'-phosphate
  modified_base 10: mod_base = OTHER; note = 2'-O-methyladenosine-3'-phosphate
  modified_base 11: mod_base = OTHER; note = 2'-O-methyluridine-3'-phosphate
  modified_base 12: mod_base = OTHER; note = 2'-O-methyladenosine-3'-phosphate
  modified_base 13: mod_base = OTHER; note = 2'-O-methylcytidine-3'-phosphate
  modified_base 14: mod_base = OTHER; note = 2'-deoxy-2'-fluorouridine-3'-phosphate
  modified_base 15: mod_base = OTHER; note = 2'-O-methyluridine-3'-phosphate
  modified_base 16: mod_base = OTHER; note = 2'-deoxy-2'-fluorocytidine-3'-phosphate
  modified_base 17: mod_base = OTHER; note = 2'-O-methyladenosine-3'-phosphate
  modified_base 18: mod_base = OTHER; note = 2'-O-methyladenosine-3'-phosphate
  modified_base 19: mod_base = OTHER; note = 2'-O-methylcytidine-3'-phosphate
  modified_base 20: mod_base = OTHER; note = 2'-O-methyladenosine-3'-phosphate
  modified_base 21: mod_base = OTHER; note = 2'-O-methylcytidine-3'-phosphorothioate
  modified_base 22: mod_base = OTHER; note = 2'-O-methylcytidine-3'-phosphorothioate
  modified_base 23: mod_base = OTHER; note = 2'-O-methyladenosine
actacagtaatacttcaacacca

SEQ ID NO: 5192 - RNA, 23 nt, synthetic construct
  source 1..23: mol_type = other RNA
  modified_base 1: mod_base = OTHER; note = 2'-O-methyladenosine-3'-phosphorothioate
  modified_base 2: mod_base = OTHER; note = 2'-deoxy-2'-fluorouridine-3'-phosphorothioate
  modified_base 3: mod_base = OTHER; note = 2'-O-methyladenosine-3'-phosphate
  modified_base 4: mod_base = OTHER; note = 2'-O-methyluridine-3'-phosphate
  modified_base 5: mod_base = OTHER; note = 2'-O-methyluridine-3'-phosphate
  modified_base 6: mod_base = OTHER; note = 2'-deoxy-2'-fluoroguanosine-3'-phosphate
  modified_base 7: mod_base = OTHER; note = 2'-O-methyluridine-3'-phosphate
  modified_base 8: mod_base = OTHER; note = 2'-deoxy-2'-fluorouridine-3'-phosphate
  modified_base 9: mod_base = OTHER; note = 2'-deoxy-2'-fluorouridine-3'-phosphate
  modified_base 10: mod_base = OTHER; note = 2'-O-methyluridine-3'-phosphate
  modified_base 11: mod_base = OTHER; note = 2'-O-methylguanosine-3'-phosphate
  modified_base 12: mod_base = OTHER; note = 2'-O-methylcytidine-3'-phosphate
  modified_base 13: mod_base = OTHER; note = 2'-O-methylcytidine-3'-phosphate
  modified_base 14: mod_base = OTHER; note = 2'-deoxy-2'-fluoroadenosine-3'-phosphate
  modified_base 15: mod_base = OTHER; note = 2'-O-methyladenosine-3'-phosphate
  modified_base 16: mod_base = OTHER; note = 2'-deoxy-2'-fluorocytidine-3'-phosphate
  modified_base 17: mod_base = OTHER; note = 2'-O-methyladenosine-3'-phosphate
  modified_base 18: mod_base = OTHER; note = 2'-O-methylguanosine-3'-phosphate
  modified_base 19: mod_base = OTHER; note = 2'-O-methyluridine-3'-phosphate
  modified_base 20: mod_base = OTHER; note = 2'-O-methyladenosine-3'-phosphate
  modified_base 21: mod_base = OTHER; note = 2'-O-methyladenosine-3'-phosphorothioate
  modified_base 22: mod_base = OTHER; note = 2'-O-methyluridine-3'-phosphorothioate
  modified_base 23: mod_base = OTHER; note = 2'-O-methyluridine
atattgttttgccaacagtaatt

SEQ ID NO: 5193 - RNA, 23 nt, synthetic construct
  source 1..23: mol_type = other RNA
  modified_base 1: mod_base = OTHER; note = 2'-O-methyladenosine-3'-phosphorothioate
  modified_base 2: mod_base = OTHER; note = 2'-deoxy-2'-fluoroguanosine-3'-phosphorothioate
  modified_base 3: mod_base = OTHER; note = 2'-O-methyladenosine-3'-phosphate
  modified_base 4: mod_base = OTHER; note = 2'-O-methylcytidine-3'-phosphate
  modified_base 5: mod_base = OTHER; note = 2'-O-methylcytidine-3'-phosphate
  modified_base 6: mod_base = OTHER; note = 2'-deoxy-2'-fluoroadenosine-3'-phosphate
  modified_base 7: mod_base = OTHER; note = 2'-O-methylguanosine-3'-phosphate
  modified_base 8: mod_base = OTHER; note = 2'-deoxy-2'-fluoroadenosine-3'-phosphate
  modified_base 9: mod_base = OTHER; note = 2'-deoxy-2'-fluoroguanosine-3'-phosphate
  modified_base 10: mod_base = OTHER; note = 2'-O-methyluridine-3'-phosphate
  modified_base 11: mod_base = OTHER; note = 2'-O-methyladenosine-3'-phosphate
  modified_base 12: mod_base = OTHER; note = 2'-O-methylguanosine-3'-phosphate
  modified_base 13: mod_base = OTHER; note = 2'-O-methylguanosine-3'-phosphate
  modified_base 14: mod_base = OTHER; note = 2'-deoxy-2'-fluoroadenosine-3'-phosphate
  modified_base 15: mod_base = OTHER; note = 2'-O-methylcytidine-3'-phosphate
  modified_base 16: mod_base = OTHER; note = 2'-deoxy-2'-fluoroadenosine-3'-phosphate
  modified_base 17: mod_base = OTHER; note = 2'-O-methylcytidine-3'-phosphate
  modified_base 18: mod_base = OTHER; note = 2'-O-methyladenosine-3'-phosphate
  modified_base 19: mod_base = OTHER; note = 2'-O-methylcytidine-3'-phosphate
  modified_base 20: mod_base = OTHER; note = 2'-O-methyluridine-3'-phosphate
  modified_base 21: mod_base = OTHER; note = 2'-O-methylguanosine-3'-phosphorothioate
  modified_base 22: mod_base = OTHER; note = 2'-O-methylcytidine-3'-phosphorothioate
  modified_base 23: mod_base = OTHER; note = 2'-O-methylcytidine
agaccagagtaggacacactgcc

SEQ ID NO: 5194 - RNA, 23 nt, synthetic construct
  source 1..23: mol_type = other RNA
  modified_base 1: mod_base = OTHER; note = 2'-O-methyladenosine-3'-phosphorothioate
  modified_base 2: mod_base = OTHER; note = 2'-deoxy-2'-fluorocytidine-3'-phosphorothioate
  modified_base 3: mod_base = OTHER; note = 2'-O-methyluridine-3'-phosphate
  modified_base 4: mod_base = OTHER; note = 2'-O-methyluridine-3'-phosphate
  modified_base 5: mod_base = OTHER; note = 2'-O-methyluridine-3'-phosphate
  modified_base 6: mod_base = OTHER; note = 2'-deoxy-2'-fluoroadenosine-3'-phosphate
  modified_base 7: mod_base = OTHER; note = 2'-O-methylcytidine-3'-phosphate
  modified_base 8: mod_base = OTHER; note = 2'-deoxy-2'-fluorouridine-3'-phosphate
  modified_base 9: mod_base = OTHER; note = 2'-deoxy-2'-fluorocytidine-3'-phosphate
  modified_base 10: mod_base = OTHER; note = 2'-O-methylcytidine-3'-phosphate
  modified_base 11: mod_base = OTHER; note = 2'-O-methyladenosine-3'-phosphate
  modified_base 12: mod_base = OTHER; note = 2'-O-methyluridine-3'-phosphate
  modified_base 13: mod_base = OTHER; note = 2'-O-methylcytidine-3'-phosphate
  modified_base 14: mod_base = OTHER; note = 2'-deoxy-2'-fluorouridine-3'-phosphate
  modified_base 15: mod_base = OTHER; note = 2'-O-methylguanosine-3'-phosphate
  modified_base 16: mod_base = OTHER; note = 2'-deoxy-2'-fluoroguanosine-3'-phosphate
  modified_base 17: mod_base = OTHER; note = 2'-O-methyluridine-3'-phosphate
  modified_base 18: mod_base = OTHER; note = 2'-O-methyluridine-3'-phosphate
  modified_base 19: mod_base = OTHER; note = 2'-O-methyluridine-3'-phosphate
  modified_base 20: mod_base = OTHER; note = 2'-O-methylcytidine-3'-phosphate
  modified_base 21: mod_base = OTHER; note = 2'-O-methyluridine-3'-phosphorothioate
  modified_base 22: mod_base = OTHER; note = 2'-O-methyluridine-3'-phosphorothioate
  modified_base 23: mod_base = OTHER; note = 2'-O-methylcytidine
actttactccatctggtttcttc

SEQ ID NO: 5195 - RNA, 23 nt, synthetic construct
  source 1..23: mol_type = other RNA
  modified_base 1: mod_base = OTHER; note = 2'-O-methyladenosine-3'-phosphorothioate
  modified_base 2: mod_base = OTHER; note = 2'-deoxy-2'-fluoroadenosine-3'-phosphorothioate
  modified_base 3: mod_base = OTHER; note = 2'-O-methylguanosine-3'-phosphate
  modified_base 4: mod_base = OTHER; note = 2'-O-methylguanosine-3'-phosphate
  modified_base 5: mod_base = OTHER; note = 2'-O-methyladenosine-3'-phosphate
  modified_base 6: mod_base = OTHER; note = 2'-deoxy-2'-fluoroadenosine-3'-phosphate
  modified_base 7: mod_base = OTHER; note = 2'-O-methylguanosine-3'-phosphate
  modified_base 8: mod_base = OTHER; note = 2'-deoxy-2'-fluoroguanosine-3'-phosphate
  modified_base 9: mod_base = OTHER; note = 2'-deoxy-2'-fluorouridine-3'-phosphate
  modified_base 10: mod_base = OTHER; note = 2'-O-methyluridine-3'-phosphate
  modified_base 11: mod_base = OTHER; note = 2'-O-methyluridine-3'-phosphate
  modified_base 12: mod_base = OTHER; note = 2'-O-methylguanosine-3'-phosphate
  modified_base 13: mod_base = OTHER; note = 2'-O-methylcytidine-3'-phosphate
  modified_base 14: mod_base = OTHER; note = 2'-deoxy-2'-fluorouridine-3'-phosphate
  modified_base 15: mod_base = OTHER; note = 2'-O-methylguanosine-3'-phosphate
  modified_base 16: mod_base = OTHER; note = 2'-deoxy-2'-fluorouridine-3'-phosphate
  modified_base 17: mod_base = OTHER; note = 2'-O-methylguanosine-3'-phosphate
  modified_base 18: mod_base = OTHER; note = 2'-O-methylguanosine-3'-phosphate
  modified_base 19: mod_base = OTHER; note = 2'-O-methyladenosine-3'-phosphate
  modified_base 20: mod_base = OTHER; note = 2'-O-methylguanosine-3'-phosphate
  modified_base 21: mod_base = OTHER; note = 2'-O-methylcytidine-3'-phosphorothioate
  modified_base 22: mod_base = OTHER; note = 2'-O-methyladenosine-3'-phosphorothioate
  modified_base 23: mod_base = OTHER; note = 2'-O-methyluridine
aaggaaggtttgctgtggagcat

SEQ ID NO: 5196 - RNA, 23 nt, synthetic construct
  source 1..23: mol_type = other RNA
  modified_base 1: mod_base = OTHER; note = 2'-O-methyladenosine-3'-phosphorothioate
  modified_base 2: mod_base = OTHER; note = 2'-deoxy-2'-fluorouridine-3'-phosphorothioate
  modified_base 3: mod_base = OTHER; note = 2'-O-methyluridine-3'-phosphate
  modified_base 4: mod_base = OTHER; note = 2'-O-methyluridine-3'-phosphate
  modified_base 5: mod_base = OTHER; note = 2'-O-methylguanosine-3'-phosphate
  modified_base 6: mod_base = OTHER; note = 2'-deoxy-2'-fluorouridine-3'-phosphate
  modified_base 7: mod_base = OTHER; note = 2'-O-methylguanosine-3'-phosphate
  modified_base 8: mod_base = OTHER; note = 2'-deoxy-2'-fluorouridine-3'-phosphate
  modified_base 9: mod_base = OTHER; note = 2'-deoxy-2'-fluoroadenosine-3'-phosphate
  modified_base 10: mod_base = OTHER; note = 2'-O-methylguanosine-3'-phosphate
  modified_base 11: mod_base = OTHER; note = 2'-O-methylguanosine-3'-phosphate
  modified_base 12: mod_base = OTHER; note = 2'-O-methylcytidine-3'-phosphate
  modified_base 13: mod_base = OTHER; note = 2'-O-methyluridine-3'-phosphate
  modified_base 14: mod_base = OTHER; note = 2'-deoxy-2'-fluorouridine-3'-phosphate
  modified_base 15: mod_base = OTHER; note = 2'-O-methylcytidine-3'-phosphate
  modified_base 16: mod_base = OTHER; note = 2'-deoxy-2'-fluoroadenosine-3'-phosphate
  modified_base 17: mod_base = OTHER; note = 2'-O-methyladenosine-3'-phosphate
  modified_base 18: mod_base = OTHER; note = 2'-O-methyladenosine-3'-phosphate
  modified_base 19: mod_base = OTHER; note = 2'-O-methylguanosine-3'-phosphate
  modified_base 20: mod_base = OTHER; note = 2'-O-methyluridine-3'-phosphate
  modified_base 21: mod_base = OTHER; note = 2'-O-methylcytidine-3'-phosphorothioate
  modified_base 22: mod_base = OTHER; note = 2'-O-methylcytidine-3'-phosphorothioate
  modified_base 23: mod_base = OTHER; note = 2'-O-methylcytidine
atttgtgtaggcttcaaagtccc

SEQ ID NO: 5197 - RNA, 23 nt, synthetic construct
  source 1..23: mol_type = other RNA
ttccacacaaacttaaattactg

SEQ ID NO: 5198 - RNA, 23 nt, synthetic construct
  source 1..23: mol_type = other RNA
actagcacttttgatcatcttca

SEQ ID NO: 5199 - RNA, 23 nt, synthetic construct
  source 1..23: mol_type = other RNA
gacctcatcaataaaatgcttac

SEQ ID NO: 5200 - RNA, 23 nt, synthetic construct
  source 1..23: mol_type = other RNA
tctccatcattgttattttaacg

SEQ ID NO: 5201 - RNA, 23 nt, synthetic construct
  source 1..23: mol_type = other RNA
aatccacactattattctaaacc

SEQ ID NO: 5202 - RNA, 23 nt, synthetic construct
  source 1..23: mol_type = other RNA
gactcctaaaagcttctctaaac

SEQ ID NO: 5203 - RNA, 23 nt, synthetic construct
  source 1..23: mol_type = other RNA
ctggtctcatttagtacataaca

SEQ ID NO: 5204 - RNA, 23 nt, synthetic construct
  source 1..23: mol_type = other RNA
aacagacttaagaactattgttc

SEQ ID NO: 5205 - RNA, 23 nt, synthetic construct
  source 1..23: mol_type = other RNA
ttcatcaagtttctctgttaatg

SEQ ID NO: 5206 - RNA, 23 nt, synthetic construct
  source 1..23: mol_type = other RNA
tcattctctatattctacttgtg

SEQ ID NO: 5207 - RNA, 23 nt, synthetic construct
  source 1..23: mol_type = other RNA
gactgcttgaagaaatttaatgc

SEQ ID NO: 5208 - RNA, 23 nt, synthetic construct
  source 1..23: mol_type = other RNA
atcactgacattaatattcctat

SEQ ID NO: 5209 - RNA, 23 nt, synthetic construct
  source 1..23: mol_type = other RNA
tcaaccacattgttttgaaaata

SEQ ID NO: 5210 - RNA, 23 nt, synthetic construct
  source 1..23: mol_type = other RNA
catcatcactagctagttttcta

SEQ ID NO: 5211 - RNA, 23 nt, synthetic construct
  source 1..23: mol_type = other RNA
tcttactttttcctaagattcag

SEQ ID NO: 5212 - RNA, 23 nt, synthetic construct
  source 1..23: mol_type = other RNA
tcttacctagaataaatagtctc

SEQ ID NO: 5213 - RNA, 23 nt, synthetic construct
  source 1..23: mol_type = other RNA
tgggtcttctaaatttcaacagt

SEQ ID NO: 5214 - RNA, 23 nt, synthetic construct
  source 1..23: mol_type = other RNA
ttcctatacattgtttacacttc

SEQ ID NO: 5215 - RNA, 23 nt, synthetic construct
  source 1..23: mol_type = other RNA
tctctcttgaatcagagtatcat

SEQ ID NO: 5216 - RNA, 23 nt, synthetic construct
  source 1..23: mol_type = other RNA
ttgctgagaacaatatagttaac

SEQ ID NO: 5217 - RNA, 23 nt, synthetic construct
  source 1..23: mol_type = other RNA
tgcgtccatctttatttcttcag

SEQ ID NO: 5218 - RNA, 23 nt, synthetic construct
  source 1..23: mol_type = other RNA
tcagcttcttttgatttgctaaa

SEQ ID NO: 5219 - RNA, 23 nt, synthetic construct
  source 1..23: mol_type = other RNA
tgatctcttttctttatcctgtt

SEQ ID NO: 5220 - RNA, 23 nt, synthetic construct
  source 1..23: mol_type = other RNA
accacaaatgaattacacattta

SEQ ID NO: 5221 - RNA, 23 nt, synthetic construct
  source 1..23: mol_type = other RNA
gctttgtccaaaagcaataaacc

SEQ ID NO: 5222 - RNA, 23 nt, synthetic construct
  source 1..23: mol_type = other RNA
tttctgagtttaatcactttagg

SEQ ID NO: 5223 - RNA, 23 nt, synthetic construct
  source 1..23: mol_type = other RNA
ttccaagtacaactcttcatcaa

SEQ ID NO: 5224 - RNA, 23 nt, synthetic construct
  source 1..23: mol_type = other RNA
gattctactttgaaaatgctttg

SEQ ID NO: 5225 - RNA, 23 nt, synthetic construct
  source 1..23: mol_type = other RNA
cttatcatatattccttcctata

SEQ ID NO: 5226 - RNA, 23 nt, synthetic construct
  source 1..23: mol_type = other RNA
tccctctcaaaacctacataata

SEQ ID NO: 5227 - RNA, 23 nt, synthetic construct
  source 1..23: mol_type = other RNA
caagttaattgttctctgtgagc

SEQ ID NO: 5228 - RNA, 23 nt, synthetic construct
  source 1..23: mol_type = other RNA
tcttctatcattttgaaacactg

SEQ ID NO: 5229 - RNA, 23 nt, synthetic construct
  source 1..23: mol_type = other RNA
cccagcttgaacttgagcataca

SEQ ID NO: 5230 - RNA, 23 nt, synthetic construct
  source 1..23: mol_type = other RNA
cttcacccaaattttgaattttt

SEQ ID NO: 5231 - RNA, 23 nt, synthetic construct
  source 1..23: mol_type = other RNA
tagcagtataactattctgatca

SEQ ID NO: 5232 - RNA, 23 nt, synthetic construct
  source 1..23: mol_type = other RNA
taggttttctttgtgcttctcat

SEQ ID NO: 5233 - RNA, 23 nt, synthetic construct
  source 1..23: mol_type = other RNA
aaatgagaataaacataccaact

SEQ ID NO: 5234 - RNA, 23 nt, synthetic construct
  source 1..23: mol_type = other RNA
tcgagtgatttcattgaataaaa

SEQ ID NO: 5235 - RNA, 23 nt, synthetic construct
  source 1..23: mol_type = other RNA
cagtttccatatttgtaaaatga

SEQ ID NO: 5236 - RNA, 23 nt, synthetic construct
  source 1..23: mol_type = other RNA
gccatgctgtttttggtcaaact

SEQ ID NO: 5237 - RNA, 23 nt, synthetic construct
  source 1..23: mol_type = other RNA
tcctctactgcagtataatgtct

SEQ ID NO: 5238 - RNA, 23 nt, synthetic construct
  source 1..23: mol_type = other RNA
acttggtgtttgatttagttact

SEQ ID NO: 5239 - RNA, 23 nt, synthetic construct
  source 1..23: mol_type = other RNA
tatctttctccagaagttttacg

SEQ ID NO: 5240 - RNA, 23 nt, synthetic construct
  source 1..23: mol_type = other RNA
tgagagttcaaatacaacaattg

SEQ ID NO: 5241 - RNA, 23 nt, synthetic construct
  source 1..23: mol_type = other RNA
tctctgtgttgattactaatcat

SEQ ID NO: 5242 - RNA, 23 nt, synthetic construct
  source 1..23: mol_type = other RNA
tgtgcttttttagcttctctctt

SEQ ID NO: 5243 - RNA, 23 nt, synthetic construct
  source 1..23: mol_type = other RNA
tcctgtgactgcaacgtcttact

SEQ ID NO: 5244 - RNA, 23 nt, synthetic construct
  source 1..23: mol_type = other RNA
gccacttctgcattctctgttct

SEQ ID NO: 5245 - RNA, 23 nt, synthetic construct
  source 1..23: mol_type = other RNA
ttctcatttttcctttgttgatt

SEQ ID NO: 5246 - RNA, 23 nt, synthetic construct
  source 1..23: mol_type = other RNA
gtcctcagaagcctatttttaaa

SEQ ID NO: 5247 - RNA, 23 nt, synthetic construct
  source 1..23: mol_type = other RNA
cgatagtaattcacagtcctcag

SEQ ID NO: 5248 - RNA, 23 nt, synthetic construct
  source 1..23: mol_type = other RNA
tctttctcaaatctgtgatctct

SEQ ID NO: 5249 - RNA, 23 nt, synthetic construct
  source 1..23: mol_type = other RNA
atgctgccaaaattatcaacacc

SEQ ID NO: 5250 - RNA, 23 nt, synthetic construct
  source 1..23: mol_type = other RNA
aggactgattgatatatttaaga

SEQ ID NO: 5251 - RNA, 23 nt, synthetic construct
  source 1..23: mol_type = other RNA
tttacacttttaacttagcatgt

SEQ ID NO: 5252 - RNA, 23 nt, synthetic construct
  source 1..23: mol_type = other RNA
gctctgagcaagttacctcttcc

SEQ ID NO: 5253 - RNA, 23 nt, synthetic construct
  source 1..23: mol_type = other RNA
ctgccctctttatgtaggtttac

SEQ ID NO: 5254 - RNA, 23 nt, synthetic construct
  source 1..23: mol_type = other RNA
ttcaaggaatattaatcttcacc

SEQ ID NO: 5255 - RNA, 23 nt, synthetic construct
  source 1..23: mol_type = other RNA
tcatgttgtttatgtttcttacc

SEQ ID NO: 5256 - RNA, 23 nt, synthetic construct
  source 1..23: mol_type = other RNA
atatactcggactcaaatgtctc

SEQ ID NO: 5257 - RNA, 23 nt, synthetic construct
  source 1..23: mol_type = other RNA
gttgaagcttttctgataattat

SEQ ID NO: 5258 - RNA, 23 nt, synthetic construct
  source 1..23: mol_type = other RNA
tagaactctttgctgttaatctg

SEQ ID NO: 5259 - RNA, 23 nt, synthetic construct
  source 1..23: mol_type = other RNA
cattgaaagttttgctgattaac

SEQ ID NO: 5260 - RNA, 23 nt, synthetic construct
  source 1..23: mol_type = other RNA
taatgctagaagaaaactaaagg

SEQ ID NO: 5261 - RNA, 23 nt, synthetic construct
  source 1..23: mol_type = other RNA
ctcctcttcatgcatgtttctga

SEQ ID NO: 5262 - RNA, 23 nt, synthetic construct
  source 1..23: mol_type = other RNA
cttactgcttttgaacctgaagc

SEQ ID NO: 5263 - RNA, 23 nt, synthetic construct
  source 1..23: mol_type = other RNA
gtcaacgttctactgttgcttcc

SEQ ID NO: 5264 - RNA, 23 nt, synthetic construct
  source 1..23: mol_type = other RNA
cccagatagtccttgttttaatg

SEQ ID NO: 5265 - RNA, 23 nt, synthetic construct
  source 1..23: mol_type = other RNA
ggacactgtatatatttcttgcc

SEQ ID NO: 5266 - RNA, 23 nt, synthetic construct
  source 1..23: mol_type = other RNA
ccaacttaataaagatattgtga

SEQ ID NO: 5267 - RNA, 23 nt, synthetic construct
  source 1..23: mol_type = other RNA
tatttctatttgtgtctcctcta

SEQ ID NO: 5268 - RNA, 23 nt, synthetic construct
  source 1..23: mol_type = other RNA
aggcttacaaatgtttgccattc

SEQ ID NO: 5269 - RNA, 23 nt, synthetic construct
  source 1..23: mol_type = other RNA
tcctgtgatttttgttctcttcc

SEQ ID NO: 5270 - RNA, 23 nt, synthetic construct
  source 1..23: mol_type = other RNA
actgatcgaagctatcaacaatg

SEQ ID NO: 5271 - RNA, 23 nt, synthetic construct
  source 1..23: mol_type = other RNA
acatgcctgtttatgctgttcat

SEQ ID NO: 5272 - RNA, 23 nt, synthetic construct
  source 1..23: mol_type = other RNA
ttagaatttcccagtttaaaaca

SEQ ID NO: 5273 - RNA, 23 nt, synthetic construct
  source 1..23: mol_type = other RNA
ctgtagatcaagtttgtcttccg

SEQ ID NO: 5274 - RNA, 23 nt, synthetic construct
  source 1..23: mol_type = other RNA
aaacaacccttcctcttttctct

SEQ ID NO: 5275 - RNA, 23 nt, synthetic construct
  source 1..23: mol_type = other RNA
gaagtgaaatttgcataatgaat

SEQ ID NO: 5276 - RNA, 23 nt, synthetic construct
  source 1..23: mol_type = other RNA
ctttaggatatattcacattgtt

SEQ ID NO: 5277 - RNA, 23 nt, synthetic construct
  source 1..23: mol_type = other RNA
catcttagatattattgctagtg

SEQ ID NO: 5278 - RNA, 23 nt, synthetic construct
  source 1..23: mol_type = other RNA
tcctggttaaaatggatgatttt

SEQ ID NO: 5279 - RNA, 23 nt, synthetic construct
  source 1..23: mol_type = other RNA
ctcttccctgaagtgctttacag

SEQ ID NO: 5280 - RNA, 23 nt, synthetic construct
  source 1..23: mol_type = other RNA
ctcaccactgtcttgatgctctg

SEQ ID NO: 5281 - RNA, 23 nt, synthetic construct
  source 1..23: mol_type = other RNA
atacaactcttgttttgctgttg

SEQ ID NO: 5282 - RNA, 23 nt, synthetic construct
  source 1..23: mol_type = other RNA
ttcctttcgtttgctttcttatt

SEQ ID NO: 5283 - RNA, 23 nt, synthetic construct
  source 1..23: mol_type = other RNA
gtgggcaaaatcacttatgaaag

SEQ ID NO: 5284 - RNA, 23 nt, synthetic construct
  source 1..23: mol_type = other RNA
gtaacactttgatgttatcattt

SEQ ID NO: 5285 - RNA, 23 nt, synthetic construct
  source 1..23: mol_type = other RNA
tcttcctccaaggagttagaatt

SEQ ID NO: 5286 - RNA, 23 nt, synthetic construct
  source 1..23: mol_type = other RNA
ataagtgttttgaacttgatctt

SEQ ID NO: 5287 - RNA, 23 nt, synthetic construct
  source 1..23: mol_type = other RNA
aatggcctcatttttctcttttt

SEQ ID NO: 5288 - RNA, 23 nt, synthetic construct
  source 1..23: mol_type = other RNA
ggaggtatttgcattgtttaaag

SEQ ID NO: 5289 - RNA, 23 nt, synthetic construct
  source 1..23: mol_type = other RNA
accctaatattgtgcgacttcat

SEQ ID NO: 5290 - RNA, 23 nt, synthetic construct
  source 1..23: mol_type = other RNA
agacaccaaatgaagtggtcatc

SEQ ID NO: 5291 - RNA, 23 nt, synthetic construct
  source 1..23: mol_type = other RNA
tagtagcaaatcagtatattcta

SEQ ID NO: 5292 - RNA, 23 nt, synthetic construct
  source 1..23: mol_type = other RNA
cacgaaagcaagagattatcaaa

SEQ ID NO: 5293 - RNA, 23 nt, synthetic construct
  source 1..23: mol_type = other RNA
gaccaacacagactctatcagca

SEQ ID NO: 5294 - RNA, 23 nt, synthetic construct
  source 1..23: mol_type = other RNA
gtgactagaatgatatttgatag

SEQ ID NO: 5295 - RNA, 23 nt, synthetic construct
  source 1..23: mol_type = other RNA
aagcctgagaatttgcttttagc

SEQ ID NO: 5296 - RNA, 23 nt, synthetic construct
  source 1..23: mol_type = other RNA
agcaaaacaatggtctcttctgg

SEQ ID NO: 5297 - RNA, 23 nt, synthetic construct
  source 1..23: mol_type = other RNA
aagataaacaacaaagccaacgt

SEQ ID NO: 5298 - RNA, 23 nt, synthetic construct
  source 1..23: mol_type = other RNA
ttttttttaatacgaacctgtcc

SEQ ID NO: 5299 - RNA, 23 nt, synthetic construct
  source 1..23: mol_type = other RNA
aaggtttataattctgcttaagc

SEQ ID NO: 5300 - RNA, 23 nt, synthetic construct
  source 1..23: mol_type = other RNA
ttaggataaaagcaagttcctcc

SEQ ID NO: 5301 - RNA, 23 nt, synthetic construct
  source 1..23: mol_type = other RNA
gatgtagagtgttttttttacac

SEQ ID NO: 5302 - RNA, 23 nt, synthetic construct
  source 1..23: mol_type = other RNA
tgttctctgaatgacagttgtaa

SEQ ID NO: 5303 - RNA, 23 nt, synthetic construct
  source 1..23: mol_type = other RNA
agattgtatttacctctcctgtc

SEQ ID NO: 5304 - RNA, 23 nt, synthetic construct
  source 1..23: mol_type = other RNA
cgtggcatacatgtatttaaaga

SEQ ID NO: 5305 - RNA, 23 nt, synthetic construct
  source 1..23: mol_type = other RNA
tgttgtcaagattttaaaggttt

SEQ ID NO: 5306 - RNA, 23 nt, synthetic construct
  source 1..23: mol_type = other RNA
tgtatgaaaattcctactggaca

SEQ ID NO: 5307 - RNA, 23 nt, synthetic construct
  source 1..23: mol_type = other RNA
cacctctttgtggcaaaacatct

SEQ ID NO: 5308 - RNA, 23 nt, synthetic construct
  source 1..23: mol_type = other RNA
tgcagtcagaagagactcgtgtg

SEQ ID NO: 5309 - RNA, 23 nt, synthetic construct
  source 1..23: mol_type = other RNA
caaagtcactgaacaactgatcg

SEQ ID NO: 5310 - RNA, 23 nt, synthetic construct
  source 1..23: mol_type = other RNA
ctggagcttatgattttccatca

SEQ ID NO: 5311 - RNA, 23 nt, synthetic construct
  source 1..23: mol_type = other RNA
cagtgcggatcgtttcgcaactg

SEQ ID NO: 5312 - RNA, 23 nt, synthetic construct
  source 1..23: mol_type = other RNA
agaatctgccgtcttttgaagca

SEQ ID NO: 5313 - RNA, 23 nt, synthetic construct
  source 1..23: mol_type = other RNA
cctacttcttttcccgacttctt

SEQ ID NO: 5314 - RNA, 23 nt, synthetic construct
  source 1..23: mol_type = other RNA
aactactgtaatccacaaccctg

SEQ ID NO: 5315 - RNA, 23 nt, synthetic construct
  source 1..23: mol_type = other RNA
cttttgttccattcttttcttac

SEQ ID NO: 5316 - RNA, 23 nt, synthetic construct
  source 1..23: mol_type = other RNA
atgaagatgtgaaagcacgaaag

SEQ ID NO: 5317 - RNA, 23 nt, synthetic construct
  source 1..23: mol_type = other RNA
tacagtaaatatattgagccatg

SEQ ID NO: 5318 - RNA, 23 nt, synthetic construct
  source 1..23: mol_type = other RNA
caaatgggaaagaaaacttctca

SEQ ID NO: 5319 - RNA, 23 nt, synthetic construct
  source 1..23: mol_type = other RNA
gtggcagaatgttcattttcatc

SEQ ID NO: 5320 - RNA, 23 nt, synthetic construct
  source 1..23: mol_type = other RNA
gccgcctgcatagcatatattag

SEQ ID NO: 5321 - RNA, 23 nt, synthetic construct
  source 1..23: mol_type = other RNA
gcctggctgtttttccatttccc

SEQ ID NO: 5322 - RNA, 23 nt, synthetic construct
  source 1..23: mol_type = other RNA
aaagggaaataaaagtcttttga

SEQ ID NO: 5323 - RNA, 23 nt, synthetic construct
  source 1..23: mol_type = other RNA
cgccaccctttctggtcatctcc

SEQ ID NO: 5324 - RNA, 23 nt, synthetic construct
  source 1..23: mol_type = other RNA
cttgccataatggtaaaggactg

SEQ ID NO: 5325 - RNA, 23 nt, synthetic construct
  source 1..23: mol_type = other RNA
gtcaaactgtgtaaactggaaaa

SEQ ID NO: 5326 - RNA, 23 nt, synthetic construct
  source 1..23: mol_type = other RNA
tctaaaccctcatgtacatctgg

SEQ ID NO: 5327 - RNA, 23 nt, synthetic construct
  source 1..23: mol_type = other RNA
ccttttgtgaagcagctatacgt

SEQ ID NO: 5328 - RNA, 23 nt, synthetic construct
  source 1..23: mol_type = other RNA
gaatggagatatcattgataaat

SEQ ID NO: 5329 - RNA, 23 nt, synthetic construct
  source 1..23: mol_type = other RNA
ctgtgtattcatcattgcattcc

SEQ ID NO: 5330 - RNA, 23 nt, synthetic construct
  source 1..23: mol_type = other RNA
ctgaagctttgggtaatttagtg

SEQ ID NO: 5331 - RNA, 23 nt, synthetic construct
  source 1..23: mol_type = other RNA
cagctgtgaaattggcagacttt

SEQ ID NO: 5332 - RNA, 23 nt, synthetic construct
  source 1..23: mol_type = other RNA
attaacaattaaagtgggatgat

SEQ ID NO: 5333 - RNA, 23 nt, synthetic construct
  source 1..23: mol_type = other RNA
atgctggctacaaggaatttctc

SEQ ID NO: 5334 - RNA, 23 nt, synthetic construct
  source 1..23: mol_type = other RNA
attgttattattctttgctcacg

SEQ ID NO: 5335 - RNA, 23 nt, synthetic construct
  source 1..23: mol_type = other RNA
acataacaatttgcacttggtga

SEQ ID NO: 5336 - RNA, 23 nt, synthetic construct
  source 1..23: mol_type = other RNA
gtcttccgcactaagatgtgagg

SEQ ID NO: 5337 - RNA, 23 nt, synthetic construct
  source 1..23: mol_type = other RNA
ttctctcatctcacctctctgtg

SEQ ID NO: 5338 - RNA, 23 nt, synthetic construct
  source 1..23: mol_type = other RNA
agcacccatggatctgtcaacgt

SEQ ID NO: 5339 - RNA, 23 nt, synthetic construct
  source 1..23: mol_type = other RNA
gaataaaattctactgacttcta

SEQ ID NO: 5340 - RNA, 23 nt, synthetic construct
  source 1..23: mol_type = other RNA
ggtgccatcttgacaactatgct

SEQ ID NO: 5341 - RNA, 23 nt, synthetic construct
  source 1..23: mol_type = other RNA
ggacttaggtatcctaactatgt

SEQ ID NO: 5342 - RNA, 23 nt, synthetic construct
  source 1..23: mol_type = other RNA
ctctgcttctactcctcctgctc

SEQ ID NO: 5343 - RNA, 23 nt, synthetic construct
  source 1..23: mol_type = other RNA
tgtgaggaaattgtgatttgttc

SEQ ID NO: 5344 - RNA, 23 nt, synthetic construct
  source 1..23: mol_type = other RNA
cggacgagtatcagcttttcgag

SEQ ID NO: 5345 - RNA, 23 nt, synthetic construct
  source 1..23: mol_type = other RNA
cttccctctgaccctcagtttcc

SEQ ID NO: 5346 - RNA, 23 nt, synthetic construct
  source 1..23: mol_type = other RNA
aagcccttttgataacagaagcc

SEQ ID NO: 5347 - RNA, 23 nt, synthetic construct
  source 1..23: mol_type = other RNA
atagaaattaaatggtagcagta

SEQ ID NO: 5348 - RNA, 23 nt, synthetic construct
  source 1..23: mol_type = other RNA
gggatggattttcaccgattcta

SEQ ID NO: 5349 - RNA, 23 nt, synthetic construct
  source 1..23: mol_type = other RNA
aaacatcacacttgctcacatgc

SEQ ID NO: 5350 - RNA, 23 nt, synthetic construct
  source 1..23: mol_type = other RNA
catctaaggcctgaaaaccattc

SEQ ID NO: 5351 - RNA, 23 nt, synthetic construct
  source 1..23: mol_type = other RNA
ttttacgtaaagatccttatgga

SEQ ID NO: 5352 - RNA, 23 nt, synthetic construct
  source 1..23: mol_type = other RNA
actacagtgaagctgatgccagt

SEQ ID NO: 5353 - RNA, 23 nt, synthetic construct
  source 1..23: mol_type = other RNA
gaatttgctgaattgaattgttt

SEQ ID NO: 5354 - RNA, 23 nt, synthetic construct
  source 1..23: mol_type = other RNA
cttaagctctagtttggacttag

SEQ ID NO: 5355 - RNA, 23 nt, synthetic construct
  source 1..23: mol_type = other RNA
ggctggctagtagtgtgtgagaa

SEQ ID NO: 5356 - RNA, 23 nt, synthetic construct
  source 1..23: mol_type = other RNA
atatgtgatgcatcatcttatca

SEQ ID NO: 5357 - RNA, 23 nt, synthetic construct
  source 1..23: mol_type = other RNA
gtcctacatgtaatgcatatgtg

SEQ ID NO: 5358 - RNA, 23 nt, synthetic construct
  source 1..23: mol_type = other RNA
ctcagcagccaagagtttgttga

SEQ ID NO: 5359 - RNA, 23 nt, synthetic construct
  source 1..23: mol_type = other RNA
cctccaatccagccttcacatgg

SEQ ID NO: 5360 - RNA, 23 nt, synthetic construct
  source 1..23: mol_type = other RNA
tcaccaacagtacccatcaagcc

SEQ ID NO: 5361 - RNA, 23 nt, synthetic construct
  source 1..23: mol_type = other RNA
ttctgctagggatcatcagaaac

SEQ ID NO: 5362 - RNA, 23 nt, synthetic construct
  source 1..23: mol_type = other RNA
ttggtttgctaccacataaagcc

SEQ ID NO: 5363 - RNA, 23 nt, synthetic construct
  source 1..23: mol_type = other RNA
tcagtgtacagcatcatgctcca

SEQ ID NO: 5364 - RNA, 23 nt, synthetic construct
  source 1..23: mol_type = other RNA
gatggcttcgaccacaacctgca

SEQ ID NO: 5365 - RNA, 23 nt, synthetic construct
  source 1..23: mol_type = other RNA
tgccagtcattgcattcagcaga

SEQ ID NO: 5366 - RNA, 23 nt, synthetic construct
  source 1..23: mol_type = other RNA
tgcttccatgatgcacagacagg

SEQ ID NO: 5367 - RNA, 23 nt, synthetic construct
  source 1..23: mol_type = other RNA
gccaggaggataccaacttgata

SEQ ID NO: 5368 - RNA, 23 nt, synthetic construct
  source 1..23: mol_type = other RNA
cctgatggaaacaaggagtcaac

SEQ ID NO: 5369 - RNA, 23 nt, synthetic construct
  source 1..23: mol_type = other RNA
agaagcaagaatcagttggtttg

SEQ ID NO: 5370 - RNA, 23 nt, synthetic construct
  source 1..23: mol_type = other RNA
cgcaactgcttgccactcgtccc

SEQ ID NO: 5371 - RNA, 23 nt, synthetic construct
  source 1..23: mol_type = other RNA
tggtgttgaagtattactgtaga

SEQ ID NO: 5372 - RNA, 23 nt, synthetic construct
  source 1..23: mol_type = other RNA
aattactgttggcaaaacaatag

SEQ ID NO: 5373 - RNA, 23 nt, synthetic construct
  source 1..23: mol_type = other RNA
ggcagtgtgtcctactctggtct

SEQ ID NO: 5374 - RNA, 23 nt, synthetic construct
  source 1..23: mol_type = other RNA
gaagaaaccagatggagtaaaga

SEQ ID NO: 5375 - RNA, 23 nt, synthetic construct
  source 1..23: mol_type = other RNA
atgctccacagcaaaccttccta

SEQ ID NO: 5376 - RNA, 23 nt, synthetic construct
  source 1..23: mol_type = other RNA
gggactttgaagcctacacaaaa

SEQ ID NO: 5377 - RNA, 21 nt, synthetic construct
  source 1..21: mol_type = other RNA
gtgcggatcgtttcgcaactt

SEQ ID NO: 5378 - RNA, 21 nt, synthetic construct
  source 1..21: mol_type = other RNA
caactgcttgccactcgtcct

SEQ ID NO: 5379 - RNA, 21 nt, synthetic construct
  source 1..21: mol_type = other RNA
ctggctgtttttccatttcct

SEQ ID NO: 5380 - RNA, 21 nt, synthetic construct
  source 1..21: mol_type = other RNA
ccaccctttctggtcatctct

SEQ ID NO: 5381 - RNA, 21 nt, synthetic construct
  source 1..21: mol_type = other RNA
tggcttcgaccacaacctgct

SEQ ID NO: 5382 - RNA, 21 nt, synthetic construct
  source 1..21: mol_type = other RNA
gacgagtatcagcttttcgat

SEQ ID NO: 5383 - RNA, 21 nt, synthetic construct
  source 1..21: mol_type = other RNA
tatgaaaattcctactggact

SEQ ID NO: 5384 - RNA, 21 nt, synthetic construct
  source 1..21: mol_type = other RNA
gctgccaaaattatcaacact

SEQ ID NO: 5385 - RNA, 21 nt, synthetic construct
  source 1..21: mol_type = other RNA
ctgctagggatcatcagaaat

SEQ ID NO: 5386 - RNA, 21 nt, synthetic construct
  source 1..21: mol_type = other RNA
aatctgccgtcttttgaagct

SEQ ID NO: 5387 - RNA, 21 nt, synthetic construct
  source 1..21: mol_type = other RNA
cctaatattgtgcgacttcat

SEQ ID NO: 5388 - RNA, 21 nt, synthetic construct
  source 1..21: mol_type = other RNA
ttggtgtttgatttagttact

SEQ ID NO: 5389 - RNA, 21 nt, synthetic construct
  source 1..21: mol_type = other RNA
tacagtgaagctgatgccagt

SEQ ID NO: 5390 - RNA, 21 nt, synthetic construct
  source 1..21: mol_type = other RNA
ccagtcattgcattcagcagt

SEQ ID NO: 5391 - RNA, 21 nt, synthetic construct
  source 1..21: mol_type = other RNA
gcctgagaatttgcttttagt

SEQ ID NO: 5392 - RNA, 21 nt, synthetic construct
  source 1..21: mol_type = other RNA
gctgtgaaattggcagacttt

SEQ ID NO: 5393 - RNA, 21 nt, synthetic construct
  source 1..21: mol_type = other RNA
tctttctccagaagttttact

SEQ ID NO: 5394 - RNA, 21 nt, synthetic construct
  source 1..21: mol_type = other RNA
ttacgtaaagatccttatggt

SEQ ID NO: 5395 - RNA, 21 nt, synthetic construct
  source 1..21: mol_type = other RNA
attctctatattctacttgtt

SEQ ID NO: 5396 - RNA, 21 nt, synthetic construct
  source 1..21: mol_type = other RNA
ccaacacagactctatcagct

SEQ ID NO: 5397 - RNA, 21 nt, synthetic construct
  source 1..21: mol_type = other RNA
ggagcttatgattttccatct

SEQ ID NO: 5398 - RNA, 21 nt, synthetic construct
  source 1..21: mol_type = other RNA
cctcatcaataaaatgcttat

SEQ ID NO: 5399 - RNA, 21 nt, synthetic construct
  source 1..21: mol_type = other RNA
cacccatggatctgtcaacgt

SEQ ID NO: 5400 - RNA, 21 nt, synthetic construct
  source 1..21: mol_type = other RNA
caacgttctactgttgcttct

SEQ ID NO: 5401 - RNA, 21 nt, synthetic construct
  source 1..21: mol_type = other RNA
cttccatgatgcacagacagt

SEQ ID NO: 5402 - RNA, 21 nt, synthetic construct
  source 1..21: mol_type = other RNA
ctgcttgaagaaatttaatgt

SEQ ID NO: 5403 - RNA, 21 nt, synthetic construct
  source 1..21: mol_type = other RNA
atgctagaagaaaactaaagt

SEQ ID NO: 5404 - RNA, 21 nt, synthetic construct
  source 1..21: mol_type = other RNA
tgccatcttgacaactatgct

SEQ ID NO: 5405 - RNA, 21 nt, synthetic construct
  source 1..21: mol_type = other RNA
gctggctacaaggaatttctt

SEQ ID NO: 5406 - RNA, 21 nt, synthetic construct
  source 1..21: mol_type = other RNA
cagcagccaagagtttgttgt

SEQ ID NO: 5407 - RNA, 21 nt, synthetic construct
  source 1..21: mol_type = other RNA
agaaaccagatggagtaaagt

SEQ ID NO: 5408 - RNA, 21 nt, synthetic construct
  source 1..21: mol_type = other RNA
gataaacaacaaagccaacgt

SEQ ID NO: 5409 - RNA, 21 nt, synthetic construct
  source 1..21: mol_type = other RNA
ctactgtaatccacaaccctt

SEQ ID NO: 5410 - RNA, 21 nt, synthetic construct
  source 1..21: mol_type = other RNA
tgatggaaacaaggagtcaat

SEQ ID NO: 5411 - RNA, 21 nt, synthetic construct
  source 1..21: mol_type = other RNA
agagttcaaatacaacaattt

SEQ ID NO: 5412 - RNA, 21 nt, synthetic construct
  source 1..21: mol_type = other RNA
gaagatgtgaaagcacgaaat

SEQ ID NO: 5413 - RNA, 21 nt, synthetic construct
  source 1..21: mol_type = other RNA
cgaaagcaagagattatcaat

SEQ ID NO: 5414 - RNA, 21 nt, synthetic construct
  source 1..21: mol_type = other RNA
aagtcactgaacaactgatct

SEQ ID NO: 5415 - RNA, 21 nt, synthetic construct
  source 1..21: mol_type = other RNA
tgatcgaagctatcaacaatt

SEQ ID NO: 5416 - RNA, 21 nt, synthetic construct
  source 1..21: mol_type = other RNA
gactttgaagcctacacaaat

SEQ ID NO: 5417 - RNA, 21 nt, synthetic construct
  source 1..21: mol_type = other RNA
tactgcttttgaacctgaagt

SEQ ID NO: 5418 - RNA, 21 nt, synthetic construct
  source 1..21: mol_type = other RNA
gaagctttgggtaatttagtt

SEQ ID NO: 5419 - RNA, 21 nt, synthetic construct
  source 1..21: mol_type = other RNA
gatggattttcaccgattctt

SEQ ID NO: 5420 - RNA, 21 nt, synthetic construct
  source 1..21: mol_type = other RNA
ttctactttgaaaatgctttt

SEQ ID NO: 5421 - RNA, 21 nt, synthetic construct
  source 1..21: mol_type = other RNA
tttgtccaaaagcaataaact

SEQ ID NO: 5422 - RNA, 21 nt, synthetic construct
  source 1..21: mol_type = other RNA
tccacactattattctaaact

SEQ ID NO: 5423 - RNA, 21 nt, synthetic construct
  source 1..21: mol_type = other RNA
taaaccctcatgtacatctgt

SEQ ID NO: 5424 - RNA, 21 nt, synthetic construct
  source 1..21: mol_type = other RNA
cgcctgcatagcatatattat

SEQ ID NO: 5425 - RNA, 21 nt, synthetic construct
  source 1..21: mol_type = other RNA
cagtcagaagagactcgtgtt

SEQ ID NO: 5426 - RNA, 21 nt, synthetic construct
  source 1..21: mol_type = other RNA
ggcagaatgttcattttcatt

SEQ ID NO: 5427 - RNA, 21 nt, synthetic construct
  source 1..21: mol_type = other RNA
accaacagtacccatcaagct

SEQ ID NO: 5428 - RNA, 21 nt, synthetic construct
  source 1..21: mol_type = other RNA
aatgggaaagaaaacttctct

SEQ ID NO: 5429 - RNA, 21 nt, synthetic construct
  source 1..21: mol_type = other RNA
cctctttgtggcaaaacatct

SEQ ID NO: 5430 - RNA, 21 nt, synthetic construct
  source 1..21: mol_type = other RNA
tctaaggcctgaaaaccattt

SEQ ID NO: 5431 - RNA, 21 nt, synthetic construct
  source 1..21: mol_type = other RNA
ggtcttctaaatttcaacagt

SEQ ID NO: 5432 - RNA, 21 nt, synthetic construct
  source 1..21: mol_type = other RNA
cacttctgcattctctgttct

SEQ ID NO: 5433 - RNA, 21 nt, synthetic construct
  source 1..21: mol_type = other RNA
cctcttcatgcatgtttctgt

SEQ ID NO: 5434 - RNA, 21 nt, synthetic construct
  source 1..21: mol_type = other RNA
cctacatgtaatgcatatgtt

SEQ ID NO: 5435 - RNA, 21 nt, synthetic construct
  source 1..21: mol_type = other RNA
atgtgatgcatcatcttatct

SEQ ID NO: 5436 - RNA, 21 nt, synthetic construct
  source 1..21: mol_type = other RNA
tatcatatattccttcctatt

SEQ ID NO: 5437 - RNA, 21 nt, synthetic construct
  source 1..21: mol_type = other RNA
cctatacattgtttacacttt

SEQ ID NO: 5438 - RNA, 21 nt, synthetic construct
  source 1..21: mol_type = other RNA
ccacacaaacttaaattactt

SEQ ID NO: 5439 - RNA, 21 nt, synthetic construct
  source 1..21: mol_type = other RNA
ttactgttggcaaaacaatat

SEQ ID NO: 5440 - RNA, 21 nt, synthetic construct
  source 1..21: mol_type = other RNA
ccaagtacaactcttcatcat

SEQ ID NO: 5441 - RNA, 21 nt, synthetic construct
  source 1..21: mol_type = other RNA
catcaagtttctctgttaatt

SEQ ID NO: 5442 - RNA, 21 nt, synthetic construct
  source 1..21: mol_type = other RNA
cagacttaagaactattgttt

SEQ ID NO: 5443 - RNA, 21 nt, synthetic construct
  source 1..21: mol_type = other RNA
ttctctgaatgacagttgtat

SEQ ID NO: 5444 - RNA, 21 nt, synthetic construct
  source 1..21: mol_type = other RNA
gaactctttgctgttaatctt

SEQ ID NO: 5445 - RNA, 21 nt, synthetic construct
  source 1..21: mol_type = other RNA
ctggttaaaatggatgatttt

SEQ ID NO: 5446 - RNA, 21 nt, synthetic construct
  source 1..21: mol_type = other RNA
ttgaaagttttgctgattaat

SEQ ID NO: 5447 - RNA, 21 nt, synthetic construct
  source 1..21: mol_type = other RNA
taacaattaaagtgggatgat

SEQ ID NO: 5448 - RNA, 21 nt, synthetic construct
  source 1..21: mol_type = other RNA
gggcaaaatcacttatgaaat

SEQ ID NO: 5449 - RNA, 21 nt, synthetic construct
  source 1..21: mol_type = other RNA
aagcaagaatcagttggtttt

SEQ ID NO: 5450 - RNA, 21 nt, synthetic construct
  source 1..21: mol_type = other RNA
ggtttgctaccacataaagct

SEQ ID NO: 5451 - RNA, 21 nt, synthetic construct
  source 1..21: mol_type = other RNA
catgctgtttttggtcaaact

SEQ ID NO: 5452 - RNA, 21 nt, synthetic construct
  source 1..21: mol_type = other RNA
caaactgtgtaaactggaaat

SEQ ID NO: 5453 - RNA, 21 nt, synthetic construct
  source 1..21: mol_type = other RNA
tctgagtttaatcactttagt

SEQ ID NO: 5454 - RNA, 21 nt, synthetic construct
  source 1..21: mol_type = other RNA
ttaggatatattcacattgtt

SEQ ID NO: 5455 - RNA, 21 nt, synthetic construct
  source 1..21: mol_type = other RNA
atttgctgaattgaattgttt

SEQ ID NO: 5456 - RNA, 21 nt, synthetic construct
  source 1..21: mol_type = other RNA
tttctcaaatctgtgatctct

SEQ ID NO: 5457 - RNA, 21 nt, synthetic construct
  source 1..21: mol_type = other RNA
atctcttttctttatcctgtt

SEQ ID NO: 5458 - RNA, 21 nt, synthetic construct
  source 1..21: mol_type = other RNA
cctttcgtttgctttcttatt

SEQ ID NO: 5459 - RNA, 21 nt, synthetic construct
  source 1..21: mol_type = other RNA
tttgttccattcttttcttat

SEQ ID NO: 5460 - RNA, 21 nt, synthetic construct
  source 1..21: mol_type = other RNA
ctggctagtagtgtgtgagat

SEQ ID NO: 5461 - RNA, 21 nt, synthetic construct
  source 1..21: mol_type = other RNA
agtgaaatttgcataatgaat

SEQ ID NO: 5462 - RNA, 21 nt, synthetic construct
  source 1..21: mol_type = other RNA
agggaaataaaagtcttttgt

SEQ ID NO: 5463 - RNA, 21 nt, synthetic construct
  source 1..21: mol_type = other RNA
tagcacttttgatcatcttct

SEQ ID NO: 5464 - RNA, 21 nt, synthetic construct
  source 1..21: mol_type = other RNA
ttgtcaagattttaaaggttt

SEQ ID NO: 5465 - RNA, 21 nt, synthetic construct
  source 1..21: mol_type = other RNA
ggtttataattctgcttaagt

SEQ ID NO: 5466 - RNA, 21 nt, synthetic construct
  source 1..21: mol_type = other RNA
taagctctagtttggacttat

SEQ ID NO: 5467 - RNA, 21 nt, synthetic construct
  source 1..21: mol_type = other RNA
acttaggtatcctaactatgt

SEQ ID NO: 5468 - RNA, 21 nt, synthetic construct
  source 1..21: mol_type = other RNA
aggtatttgcattgtttaaat

SEQ ID NO: 5469 - RNA, 21 nt, synthetic construct
  source 1..21: mol_type = other RNA
aggataaaagcaagttcctct

SEQ ID NO: 5470 - RNA, 21 nt, synthetic construct
  source 1..21: mol_type = other RNA
ctgtgactgcaacgtcttact

SEQ ID NO: 5471 - RNA, 21 nt, synthetic construct
  source 1..21: mol_type = other RNA
caggaggataccaacttgatt

SEQ ID NO: 5472 - RNA, 21 nt, synthetic construct
  source 1..21: mol_type = other RNA
tcatcactagctagttttctt

SEQ ID NO: 5473 - RNA, 21 nt, synthetic construct
  source 1..21: mol_type = other RNA
gcttacaaatgtttgccattt

SEQ ID NO: 5474 - RNA, 21 nt, synthetic construct
  source 1..21: mol_type = other RNA
aagtgttttgaacttgatctt

SEQ ID NO: 5475 - RNA, 21 nt, synthetic construct
  source 1..21: mol_type = other RNA
tgcttttttagcttctctctt

SEQ ID NO: 5476 - RNA, 21 nt, synthetic construct
  source 1..21: mol_type = other RNA
tctcttgaatcagagtatcat

SEQ ID NO: 5477 - RNA, 21 nt, synthetic construct
  source 1..21: mol_type = other RNA
ttcctccaaggagttagaatt

SEQ ID NO: 5478 - RNA, 21 nt, synthetic construct
  source 1..21: mol_type = other RNA
agaatttcccagtttaaaact

SEQ ID NO: 5479 - RNA, 21 nt, synthetic construct
  source 1..21: mol_type = other RNA
ggttttctttgtgcttctcat

SEQ ID NO: 5480 - RNA, 21 nt, synthetic construct
  source 1..21: mol_type = other RNA
ctcatttttcctttgttgatt

SEQ ID NO: 5481 - RNA, 21 nt, synthetic construct
  source 1..21: mol_type = other RNA
ctgtgatttttgttctcttct

SEQ ID NO: 5482 - RNA, 21 nt, synthetic construct
  source 1..21: mol_type = other RNA
cttccctgaagtgctttacat

SEQ ID NO: 5483 - RNA, 21 nt, synthetic construct
  source 1..21: mol_type = other RNA
tccatcattgttattttaact

SEQ ID NO: 5484 - RNA, 21 nt, synthetic construct
  source 1..21: mol_type = other RNA
atagtaattcacagtcctcat

SEQ ID NO: 5485 - RNA, 21 nt, synthetic construct
  source 1..21: mol_type = other RNA
cctcagaagcctatttttaat

SEQ ID NO: 5486 - RNA, 21 nt, synthetic construct
  source 1..21: mol_type = other RNA
acaacccttcctcttttctct

SEQ ID NO: 5487 - RNA, 21 nt, synthetic construct
  source 1..21: mol_type = other RNA
ctctcatctcacctctctgtt

SEQ ID NO: 5488 - RNA, 21 nt, synthetic construct
  source 1..21: mol_type = other RNA
tctgtgttgattactaatcat

SEQ ID NO: 5489 - RNA, 21 nt, synthetic construct
  source 1..21: mol_type = other RNA
tcttagatattattgctagtt

SEQ ID NO: 5490 - RNA, 21 nt, synthetic construct
  source 1..21: mol_type = other RNA
tgaagcttttctgataattat

SEQ ID NO: 5491 - RNA, 21 nt, synthetic construct
  source 1..21: mol_type = other RNA
cagtaaatatattgagccatt

SEQ ID NO: 5492 - RNA, 21 nt, synthetic construct
  source 1..21: mol_type = other RNA
tggcctcatttttctcttttt

SEQ ID NO: 5493 - RNA, 21 nt, synthetic construct
  source 1..21: mol_type = other RNA
ttttgtgaagcagctatacgt

SEQ ID NO: 5494 - RNA, 21 nt, synthetic construct
  source 1..21: mol_type = other RNA
tggcatacatgtatttaaagt

SEQ ID NO: 5495 - RNA, 21 nt, synthetic construct
  source 1..21: mol_type = other RNA
tgtagagtgttttttttacat

SEQ ID NO: 5496 - RNA, 21 nt, synthetic construct
  source 1..21: mol_type = other RNA
tacacttttaacttagcatgt

SEQ ID NO: 5497 - RNA, 21 nt, synthetic construct
  source 1..21: mol_type = other RNA
gtgttgaagtattactgtagt

SEQ ID NO: 5498 - RNA, 21 nt, synthetic construct
  source 1..21: mol_type = other RNA
gtagatcaagtttgtcttcct

SEQ ID NO: 5499 - RNA, 21 nt, synthetic construct
  source 1..21: mol_type = other RNA
cttccgcactaagatgtgagt

SEQ ID NO: 5500 - RNA, 21 nt, synthetic construct
  source 1..21: mol_type = other RNA
tgaggaaattgtgatttgttt

SEQ ID NO: 5501 - RNA, 21 nt, synthetic construct
  source 1..21: mol_type = other RNA
cacaaatgaattacacatttt

SEQ ID NO: 5502 - RNA, 21 nt, synthetic construct
  source 1..21: mol_type = other RNA
ttctatcattttgaaacactt

SEQ ID NO: 5503 - RNA, 21 nt, synthetic construct
  source 1..21: mol_type = other RNA
acactgtatatatttcttgct

SEQ ID NO: 5504 - RNA, 21 nt, synthetic construct
  source 1..21: mol_type = other RNA
tgccataatggtaaaggactt

SEQ ID NO: 5505 - RNA, 21 nt, synthetic construct
  source 1..21: mol_type = other RNA
gactgattgatatatttaagt

SEQ ID NO: 5506 - RNA, 21 nt, synthetic construct
  source 1..21: mol_type = other RNA
cgtccatctttatttcttcat

SEQ ID NO: 5507 - RNA, 21 nt, synthetic construct
  source 1..21: mol_type = other RNA
cagtgtgtcctactctggtct

SEQ ID NO: 5508 - RNA, 21 nt, synthetic construct
  source 1..21: mol_type = other RNA
ggtctcatttagtacataact

SEQ ID NO: 5509 - RNA, 21 nt, synthetic construct
  source 1..21: mol_type = other RNA
ataacaatttgcacttggtgt

SEQ ID NO: 5510 - RNA, 21 nt, synthetic construct
  source 1..21: mol_type = other RNA
agttaattgttctctgtgagt

SEQ ID NO: 5511 - RNA, 21 nt, synthetic construct
  source 1..21: mol_type = other RNA
caaaacaatggtctcttctgt

SEQ ID NO: 5512 - RNA, 21 nt, synthetic construct
  source 1..21: mol_type = other RNA
gctgagaacaatatagttaat

SEQ ID NO: 5513 - RNA, 21 nt, synthetic construct
  source 1..21: mol_type = other RNA
ctcctaaaagcttctctaaat

SEQ ID NO: 5514 - RNA, 21 nt, synthetic construct
  source 1..21: mol_type = other RNA
tccaatccagccttcacatgt

SEQ ID NO: 5515 - RNA, 21 nt, synthetic construct
  source 1..21: mol_type = other RNA
ttttttaatacgaacctgtct

SEQ ID NO: 5516 - RNA, 21 nt, synthetic construct
  source 1..21: mol_type = other RNA
aacactttgatgttatcattt

SEQ ID NO: 5517 - RNA, 21 nt, synthetic construct
  source 1..21: mol_type = other RNA
cagcttgaacttgagcatact

SEQ ID NO: 5518 - RNA, 21 nt, synthetic construct
  source 1..21: mol_type = other RNA
agcttcttttgatttgctaat

SEQ ID NO: 5519 - RNA, 21 nt, synthetic construct
  source 1..21: mol_type = other RNA
acatcacacttgctcacatgt

SEQ ID NO: 5520 - RNA, 21 nt, synthetic construct
  source 1..21: mol_type = other RNA
atgcctgtttatgctgttcat

SEQ ID NO: 5521 - RNA, 21 nt, synthetic construct
  source 1..21: mol_type = other RNA
atgttgtttatgtttcttact

SEQ ID NO: 5522 - RNA, 21 nt, synthetic construct
  source 1..21: mol_type = other RNA
ttacctagaataaatagtctt

SEQ ID NO: 5523 - RNA, 21 nt, synthetic construct
  source 1..21: mol_type = other RNA
tacttcttttcccgacttctt

SEQ ID NO: 5524 - RNA, 21 nt, synthetic construct
  source 1..21: mol_type = other RNA
ttactttttcctaagattcat

SEQ ID NO: 5525 - RNA, 21 nt, synthetic construct
  source 1..21: mol_type = other RNA
agtgtacagcatcatgctcct

SEQ ID NO: 5526 - RNA, 21 nt, synthetic construct
  source 1..21: mol_type = other RNA
gctccacagcaaaccttcctt

SEQ ID NO: 5527 - RNA, 21 nt, synthetic construct
  source 1..21: mol_type = other RNA
cctctcaaaacctacataatt

SEQ ID NO: 5528 - RNA, 21 nt, synthetic construct
  source 1..21: mol_type = other RNA
attgtatttacctctcctgtt

SEQ ID NO: 5529 - RNA, 21 nt, synthetic construct
  source 1..21: mol_type = other RNA
aaccacattgttttgaaaatt

SEQ ID NO: 5530 - RNA, 21 nt, synthetic construct
  source 1..21: mol_type = other RNA
tttctatttgtgtctcctctt

SEQ ID NO: 5531 - RNA, 21 nt, synthetic construct
  source 1..21: mol_type = other RNA
ctctactgcagtataatgtct

SEQ ID NO: 5532 - RNA, 21 nt, synthetic construct
  source 1..21: mol_type = other RNA
gtgtattcatcattgcattct

SEQ ID NO: 5533 - RNA, 21 nt, synthetic construct
  source 1..21: mol_type = other RNA
atggagatatcattgataaat

SEQ ID NO: 5534 - RNA, 21 nt, synthetic construct
  source 1..21: mol_type = other RNA
gcccttttgataacagaagct

SEQ ID NO: 5535 - RNA, 21 nt, synthetic construct
  source 1..21: mol_type = other RNA
cagatagtccttgttttaatt

SEQ ID NO: 5536 - RNA, 21 nt, synthetic construct
  source 1..21: mol_type = other RNA
caccactgtcttgatgctctt

SEQ ID NO: 5537 - RNA, 21 nt, synthetic construct
  source 1..21: mol_type = other RNA
tctgagcaagttacctcttct

SEQ ID NO: 5538 - RNA, 21 nt, synthetic construct
  source 1..21: mol_type = other RNA
tccctctgaccctcagtttct

SEQ ID NO: 5539 - RNA, 21 nt, synthetic construct
  source 1..21: mol_type = other RNA
gtttccatatttgtaaaatgt

SEQ ID NO: 5540 - RNA, 21 nt, synthetic construct
  source 1..21: mol_type = other RNA
atgagaataaacataccaact

SEQ ID NO: 5541 - RNA, 21 nt, synthetic construct
  source 1..21: mol_type = other RNA
aacttaataaagatattgtgt

SEQ ID NO: 5542 - RNA, 21 nt, synthetic construct
  source 1..21: mol_type = other RNA
gactagaatgatatttgatat

SEQ ID NO: 5543 - RNA, 21 nt, synthetic construct
  source 1..21: mol_type = other RNA
agaaattaaatggtagcagtt

SEQ ID NO: 5544 - RNA, 21 nt, synthetic construct
  source 1..21: mol_type = other RNA
gcagtataactattctgatct

SEQ ID NO: 5545 - RNA, 21 nt, synthetic construct
  source 1..21: mol_type = other RNA
cactgacattaatattcctat

SEQ ID NO: 5546 - RNA, 21 nt, synthetic construct
  source 1..21: mol_type = other RNA
tgttattattctttgctcact

SEQ ID NO: 5547 - RNA, 21 nt, synthetic construct
  source 1..21: mol_type = other RNA
acaactcttgttttgctgttt

SEQ ID NO: 5548 - RNA, 21 nt, synthetic construct
  source 1..21: mol_type = other RNA
gccctctttatgtaggtttat

SEQ ID NO: 5549 - RNA, 21 nt, synthetic construct
  source 1..21: mol_type = other RNA
atactcggactcaaatgtctt

SEQ ID NO: 5550 - RNA, 21 nt, synthetic construct
  source 1..21: mol_type = other RNA
acaccaaatgaagtggtcatt

SEQ ID NO: 5551 - RNA, 21 nt, synthetic construct
  source 1..21: mol_type = other RNA
gtagcaaatcagtatattctt

SEQ ID NO: 5552 - RNA, 21 nt, synthetic construct
  source 1..21: mol_type = other RNA
caaggaatattaatcttcact

SEQ ID NO: 5553 - RNA, 21 nt, synthetic construct
  source 1..21: mol_type = other RNA
tcacccaaattttgaattttt

SEQ ID NO: 5554 - RNA, 21 nt, synthetic construct
  source 1..21: mol_type = other RNA
gagtgatttcattgaataaat

SEQ ID NO: 5555 - RNA, 21 nt, synthetic construct
  source 1..21: mol_type = other RNA
ataaaattctactgacttctt

SEQ ID NO: 5556 - RNA, 23 nt, synthetic construct
  source 1..23: mol_type = other RNA
agcttcaaaagacggcagattct

SEQ ID NO: 5557 - RNA, 23 nt, synthetic construct
  source 1..23: mol_type = other RNA
atgaagtcgcacaatattagggt

SEQ ID NO: 5558 - RNA, 23 nt, synthetic construct
  source 1..23: mol_type = other RNA
agtaactaaatcaaacaccaagt

SEQ ID NO: 5559 - RNA, 23 nt, synthetic construct
  source 1..23: mol_type = other RNA
actggcatcagcttcactgtagt

SEQ ID NO: 5560 - RNA, 23 nt, synthetic construct
  source 1..23: mol_type = other RNA
actgctgaatgcaatgactggca

SEQ ID NO: 5561 - RNA, 23 nt, synthetic construct
  source 1..23: mol_type = other RNA
actaaaagcaaattctcaggctt

SEQ ID NO: 5562 - RNA, 23 nt, synthetic construct
  source 1..23: mol_type = other RNA
aaagtctgccaatttcacagctg

SEQ ID NO: 5563 - RNA, 23 nt, synthetic construct
  source 1..23: mol_type = other RNA
agtaaaacttctggagaaagata

SEQ ID NO: 5564 - RNA, 23 nt, synthetic construct
  source 1..23: mol_type = other RNA
accataaggatctttacgtaaaa

SEQ ID NO: 5565 - RNA, 23 nt, synthetic construct
  source 1..23: mol_type = other RNA
aacaagtagaatatagagaatga

SEQ ID NO: 5566 - RNA, 23 nt, synthetic construct
  source 1..23: mol_type = other RNA
agctgatagagtctgtgttggtc

SEQ ID NO: 5567 - RNA, 23 nt, synthetic construct
  source 1..23: mol_type = other RNA
agatggaaaatcataagctccag

SEQ ID NO: 5568 - RNA, 23 nt, synthetic construct
  source 1..23: mol_type = other RNA
ataagcattttattgatgaggtc

SEQ ID NO: 5569 - RNA, 23 nt, synthetic construct
  source 1..23: mol_type = other RNA
acgttgacagatccatgggtgct

SEQ ID NO: 5570 - RNA, 23 nt, synthetic construct
  source 1..23: mol_type = other RNA
agaagcaacagtagaacgttgac

SEQ ID NO: 5571 - RNA, 23 nt, synthetic construct
  source 1..23: mol_type = other RNA
actgtctgtgcatcatggaagca

SEQ ID NO: 5572 - RNA, 23 nt, synthetic construct
  source 1..23: mol_type = other RNA
acattaaatttcttcaagcagtc

SEQ ID NO: 5573 - RNA, 23 nt, synthetic construct
  source 1..23: mol_type = other RNA
actttagttttcttctagcatta

SEQ ID NO: 5574 - RNA, 23 nt, synthetic construct
  source 1..23: mol_type = other RNA
agcatagttgtcaagatggcacc

SEQ ID NO: 5575 - RNA, 23 nt, synthetic construct
  source 1..23: mol_type = other RNA
aagaaattccttgtagccagcat

SEQ ID NO: 5576 - RNA, 23 nt, synthetic construct
  source 1..23: mol_type = other RNA
acaacaaactcttggctgctgag

SEQ ID NO: 5577 - RNA, 23 nt, synthetic construct
  source 1..23: mol_type = other RNA
actttactccatctggtttcttc

SEQ ID NO: 5578 - RNA, 23 nt, synthetic construct
  source 1..23: mol_type = other RNA
acgttggctttgttgtttatctt

SEQ ID NO: 5579 - RNA, 23 nt, synthetic construct
  source 1..23: mol_type = other RNA
aagggttgtggattacagtagtt

SEQ ID NO: 5580 - RNA, 23 nt, synthetic construct
  source 1..23: mol_type = other RNA
attgactccttgtttccatcagg

SEQ ID NO: 5581 - RNA, 23 nt, synthetic construct
  source 1..23: mol_type = other RNA
aaattgttgtatttgaactctca

SEQ ID NO: 5582 - RNA, 23 nt, synthetic construct
  source 1..23: mol_type = other RNA
atttcgtgctttcacatcttcat

SEQ ID NO: 5583 - RNA, 23 nt, synthetic construct
  source 1..23: mol_type = other RNA
attgataatctcttgctttcgtg

SEQ ID NO: 5584 - RNA, 23 nt, synthetic construct
  source 1..23: mol_type = other RNA
agatcagttgttcagtgactttg

SEQ ID NO: 5585 - RNA, 23 nt, synthetic construct
  source 1..23: mol_type = other RNA
aattgttgatagcttcgatcagt

SEQ ID NO: 5586 - RNA, 23 nt, synthetic construct
  source 1..23: mol_type = other RNA
atttgtgtaggcttcaaagtccc

SEQ ID NO: 5587 - RNA, 23 nt, synthetic construct
  source 1..23: mol_type = other RNA
acttcaggttcaaaagcagtaag

SEQ ID NO: 5588 - RNA, 23 nt, synthetic construct
  source 1..23: mol_type = other RNA
aactaaattacccaaagcttcag

SEQ ID NO: 5589 - RNA, 23 nt, synthetic construct
  source 1..23: mol_type = other RNA
aagaatcggtgaaaatccatccc

SEQ ID NO: 5590 - RNA, 23 nt, synthetic construct
  source 1..23: mol_type = other RNA
aaaagcattttcaaagtagaatc

SEQ ID NO: 5591 - RNA, 23 nt, synthetic construct
  source 1..23: mol_type = other RNA
agtttattgcttttggacaaagc

SEQ ID NO: 5592 - RNA, 23 nt, synthetic construct
  source 1..23: mol_type = other RNA
agtttagaataatagtgtggatt

SEQ ID NO: 5593 - RNA, 23 nt, synthetic construct
  source 1..23: mol_type = other RNA
acagatgtacatgagggtttaga

SEQ ID NO: 5594 - RNA, 23 nt, synthetic construct
  source 1..23: mol_type = other RNA
ataatatatgctatgcaggcggc

SEQ ID NO: 5595 - RNA, 23 nt, synthetic construct
  source 1..23: mol_type = other RNA
aacacgagtctcttctgactgca

SEQ ID NO: 5596 - RNA, 23 nt, synthetic construct
  source 1..23: mol_type = other RNA
aatgaaaatgaacattctgccac

SEQ ID NO: 5597 - RNA, 23 nt, synthetic construct
  source 1..23: mol_type = other RNA
agcttgatgggtactgttggtga

SEQ ID NO: 5598 - RNA, 23 nt, synthetic construct
  source 1..23: mol_type = other RNA
agagaagttttctttcccatttg

SEQ ID NO: 5599 - RNA, 23 nt, synthetic construct
  source 1..23: mol_type = other RNA
agatgttttgccacaaagaggtg

SEQ ID NO: 5600 - RNA, 23 nt, synthetic construct
  source 1..23: mol_type = other RNA
aaatggttttcaggccttagatg

SEQ ID NO: 5601 - RNA, 23 nt, synthetic construct
  source 1..23: mol_type = other RNA
actgttgaaatttagaagaccca

SEQ ID NO: 5602 - RNA, 23 nt, synthetic construct
  source 1..23: mol_type = other RNA
agaacagagaatgcagaagtggc

SEQ ID NO: 5603 - RNA, 23 nt, synthetic construct
  source 1..23: mol_type = other RNA
acagaaacatgcatgaagaggag

SEQ ID NO: 5604 - RNA, 23 nt, synthetic construct
  source 1..23: mol_type = other RNA
aacatatgcattacatgtaggac

SEQ ID NO: 5605 - RNA, 23 nt, synthetic construct
  source 1..23: mol_type = other RNA
agataagatgatgcatcacatat

SEQ ID NO: 5606 - RNA, 23 nt, synthetic construct
  source 1..23: mol_type = other RNA
aataggaaggaatatatgataag

SEQ ID NO: 5607 - RNA, 23 nt, synthetic construct
  source 1..23: mol_type = other RNA
aaagtgtaaacaatgtataggaa

SEQ ID NO: 5608 - RNA, 23 nt, synthetic construct
  source 1..23: mol_type = other RNA
aagtaatttaagtttgtgtggaa

SEQ ID NO: 5609 - RNA, 23 nt, synthetic construct
  source 1..23: mol_type = other RNA
atattgttttgccaacagtaatt

SEQ ID NO: 5610 - RNA, 23 nt, synthetic construct
  source 1..23: mol_type = other RNA
atgatgaagagttgtacttggaa

SEQ ID NO: 5611 - RNA, 23 nt, synthetic construct
  source 1..23: mol_type = other RNA
aattaacagagaaacttgatgaa

SEQ ID NO: 5612 - RNA, 23 nt, synthetic construct
  source 1..23: mol_type = other RNA
aaacaatagttcttaagtctgtt

SEQ ID NO: 5613 - RNA, 23 nt, synthetic construct
  source 1..23: mol_type = other RNA
atacaactgtcattcagagaaca

SEQ ID NO: 5614 - RNA, 23 nt, synthetic construct
  source 1..23: mol_type = other RNA
aagattaacagcaaagagttcta

SEQ ID NO: 5615 - RNA, 23 nt, synthetic construct
  source 1..23: mol_type = other RNA
aaaatcatccattttaaccagga

SEQ ID NO: 5616 - RNA, 23 nt, synthetic construct
  source 1..23: mol_type = other RNA
attaatcagcaaaactttcaatg

SEQ ID NO: 5617 - RNA, 23 nt, synthetic construct
  source 1..23: mol_type = other RNA
atcatcccactttaattgttaat

SEQ ID NO: 5618 - RNA, 23 nt, synthetic construct
  source 1..23: mol_type = other RNA
atttcataagtgattttgcccac

SEQ ID NO: 5619 - RNA, 23 nt, synthetic construct
  source 1..23: mol_type = other RNA
aaaaccaactgattcttgcttct

SEQ ID NO: 5620 - RNA, 23 nt, synthetic construct
  source 1..23: mol_type = other RNA
agctttatgtggtagcaaaccaa

SEQ ID NO: 5621 - RNA, 23 nt, synthetic construct
  source 1..23: mol_type = other RNA
agtttgaccaaaaacagcatggc

SEQ ID NO: 5622 - RNA, 23 nt, synthetic construct
  source 1..23: mol_type = other RNA
atttccagtttacacagtttgac

SEQ ID NO: 5623 - RNA, 23 nt, synthetic construct
  source 1..23: mol_type = other RNA
actaaagtgattaaactcagaaa

SEQ ID NO: 5624 - RNA, 23 nt, synthetic construct
  source 1..23: mol_type = other RNA
aacaatgtgaatatatcctaaag

SEQ ID NO: 5625 - RNA, 23 nt, synthetic construct
  source 1..23: mol_type = other RNA
aaacaattcaattcagcaaattc

SEQ ID NO: 5626 - RNA, 23 nt, synthetic construct
  source 1..23: mol_type = other RNA
agagatcacagatttgagaaaga

SEQ ID NO: 5627 - RNA, 23 nt, synthetic construct
  source 1..23: mol_type = other RNA
aacaggataaagaaaagagatca

SEQ ID NO: 5628 - RNA, 23 nt, synthetic construct
  source 1..23: mol_type = other RNA
aataagaaagcaaacgaaaggaa

SEQ ID NO: 5629 - RNA, 23 nt, synthetic construct
  source 1..23: mol_type = other RNA
ataagaaaagaatggaacaaaag

SEQ ID NO: 5630 - RNA, 23 nt, synthetic construct
  source 1..23: mol_type = other RNA
atctcacacactactagccagcc

SEQ ID NO: 5631 - RNA, 23 nt, synthetic construct
  source 1..23: mol_type = other RNA
attcattatgcaaatttcacttc

SEQ ID NO: 5632 - RNA, 23 nt, synthetic construct
  source 1..23: mol_type = other RNA
acaaaagacttttatttcccttt

SEQ ID NO: 5633 - RNA, 23 nt, synthetic construct
  source 1..23: mol_type = other RNA
agaagatgatcaaaagtgctagt

SEQ ID NO: 5634 - RNA, 23 nt, synthetic construct
  source 1..23: mol_type = other RNA
aaacctttaaaatcttgacaaca

SEQ ID NO: 5635 - RNA, 23 nt, synthetic construct
  source 1..23: mol_type = other RNA
acttaagcagaattataaacctt

SEQ ID NO: 5636 - RNA, 23 nt, synthetic construct
  source 1..23: mol_type = other RNA
ataagtccaaactagagcttaag

SEQ ID NO: 5637 - RNA, 23 nt, synthetic construct
  source 1..23: mol_type = other RNA
acatagttaggatacctaagtcc

SEQ ID NO: 5638 - RNA, 23 nt, synthetic construct
  source 1..23: mol_type = other RNA
atttaaacaatgcaaatacctcc

SEQ ID NO: 5639 - RNA, 23 nt, synthetic construct
  source 1..23: mol_type = other RNA
agaggaacttgcttttatcctaa

SEQ ID NO: 5640 - RNA, 23 nt, synthetic construct
  source 1..23: mol_type = other RNA
agtaagacgttgcagtcacagga

SEQ ID NO: 5641 - RNA, 23 nt, synthetic construct
  source 1..23: mol_type = other RNA
aatcaagttggtatcctcctggc

SEQ ID NO: 5642 - RNA, 23 nt, synthetic construct
  source 1..23: mol_type = other RNA
aagaaaactagctagtgatgatg

SEQ ID NO: 5643 - RNA, 23 nt, synthetic construct
  source 1..23: mol_type = other RNA
aaatggcaaacatttgtaagcct

SEQ ID NO: 5644 - RNA, 23 nt, synthetic construct
  source 1..23: mol_type = other RNA
aagatcaagttcaaaacacttat

SEQ ID NO: 5645 - RNA, 23 nt, synthetic construct
  source 1..23: mol_type = other RNA
aagagagaagctaaaaaagcaca

SEQ ID NO: 5646 - RNA, 23 nt, synthetic construct
  source 1..23: mol_type = other RNA
atgatactctgattcaagagaga

SEQ ID NO: 5647 - RNA, 23 nt, synthetic construct
  source 1..23: mol_type = other RNA
aattctaactccttggaggaaga

SEQ ID NO: 5648 - RNA, 23 nt, synthetic construct
  source 1..23: mol_type = other RNA
agttttaaactgggaaattctaa

SEQ ID NO: 5649 - RNA, 23 nt, synthetic construct
  source 1..23: mol_type = other RNA
atgagaagcacaaagaaaaccta

SEQ ID NO: 5650 - RNA, 23 nt, synthetic construct
  source 1..23: mol_type = other RNA
aatcaacaaaggaaaaatgagaa

SEQ ID NO: 5651 - RNA, 23 nt, synthetic construct
  source 1..23: mol_type = other RNA
agaagagaacaaaaatcacagga

SEQ ID NO: 5652 - RNA, 23 nt, synthetic construct
  source 1..23: mol_type = other RNA
atgtaaagcacttcagggaagag

SEQ ID NO: 5653 - RNA, 23 nt, synthetic construct
  source 1..23: mol_type = other RNA
agttaaaataacaatgatggaga

SEQ ID NO: 5654 - RNA, 23 nt, synthetic construct
  source 1..23: mol_type = other RNA
atgaggactgtgaattactatcg

SEQ ID NO: 5655 - RNA, 23 nt, synthetic construct
  source 1..23: mol_type = other RNA
attaaaaataggcttctgaggac

SEQ ID NO: 5656 - RNA, 23 nt, synthetic construct
  source 1..23: mol_type = other RNA
agagaaaagaggaagggttgttt

SEQ ID NO: 5657 - RNA, 23 nt, synthetic construct
  source 1..23: mol_type = other RNA
aacagagaggtgagatgagagaa

SEQ ID NO: 5658 - RNA, 23 nt, synthetic construct
  source 1..23: mol_type = other RNA
atgattagtaatcaacacagaga

SEQ ID NO: 5659 - RNA, 23 nt, synthetic construct
  source 1..23: mol_type = other RNA
aactagcaataatatctaagatg

SEQ ID NO: 5660 - RNA, 23 nt, synthetic construct
  source 1..23: mol_type = other RNA
ataattatcagaaaagcttcaac

SEQ ID NO: 5661 - RNA, 23 nt, synthetic construct
  source 1..23: mol_type = other RNA
aatggctcaatatatttactgta

SEQ ID NO: 5662 - RNA, 23 nt, synthetic construct
  source 1..23: mol_type = other RNA
aaaaagagaaaaatgaggccatt

SEQ ID NO: 5663 - RNA, 23 nt, synthetic construct
  source 1..23: mol_type = other RNA
acgtatagctgcttcacaaaagg

SEQ ID NO: 5664 - RNA, 23 nt, synthetic construct
  source 1..23: mol_type = other RNA
actttaaatacatgtatgccacg

SEQ ID NO: 5665 - RNA, 23 nt, synthetic construct
  source 1..23: mol_type = other RNA
atgtaaaaaaaacactctacatc

SEQ ID NO: 5666 - RNA, 23 nt, synthetic construct
  source 1..23: mol_type = other RNA
acatgctaagttaaaagtgtaaa

SEQ ID NO: 5667 - RNA, 23 nt, synthetic construct
  source 1..23: mol_type = other RNA
actacagtaatacttcaacacca

SEQ ID NO: 5668 - RNA, 23 nt, synthetic construct
  source 1..23: mol_type = other RNA
aggaagacaaacttgatctacag

SEQ ID NO: 5669 - RNA, 23 nt, synthetic construct
  source 1..23: mol_type = other RNA
actcacatcttagtgcggaagac

SEQ ID NO: 5670 - RNA, 23 nt, synthetic construct
  source 1..23: mol_type = other RNA
aaacaaatcacaatttcctcaca

SEQ ID NO: 5671 - RNA, 23 nt, synthetic construct
  source 1..23: mol_type = other RNA
aaaatgtgtaattcatttgtggt

SEQ ID NO: 5672 - RNA, 23 nt, synthetic construct
  source 1..23: mol_type = other RNA
aagtgtttcaaaatgatagaaga

SEQ ID NO: 5673 - RNA, 23 nt, synthetic construct
  source 1..23: mol_type = other RNA
agcaagaaatatatacagtgtcc

SEQ ID NO: 5674 - RNA, 23 nt, synthetic construct
  source 1..23: mol_type = other RNA
aagtcctttaccattatggcaag

SEQ ID NO: 5675 - RNA, 23 nt, synthetic construct
  source 1..23: mol_type = other RNA
acttaaatatatcaatcagtcct

SEQ ID NO: 5676 - RNA, 23 nt, synthetic construct
  source 1..23: mol_type = other RNA
atgaagaaataaagatggacgca

SEQ ID NO: 5677 - RNA, 23 nt, synthetic construct
  source 1..23: mol_type = other RNA
agaccagagtaggacacactgcc

SEQ ID NO: 5678 - RNA, 23 nt, synthetic construct
  source 1..23: mol_type = other RNA
agttatgtactaaatgagaccag

SEQ ID NO: 5679 - RNA, 23 nt, synthetic construct
  source 1..23: mol_type = other RNA
acaccaagtgcaaattgttatgt

SEQ ID NO: 5680 - RNA, 23 nt, synthetic construct
  source 1..23: mol_type = other RNA
actcacagagaacaattaacttg

SEQ ID NO: 5681 - RNA, 23 nt, synthetic construct
  source 1..23: mol_type = other RNA
acagaagagaccattgttttgct

SEQ ID NO: 5682 - RNA, 23 nt, synthetic construct
  source 1..23: mol_type = other RNA
attaactatattgttctcagcaa

SEQ ID NO: 5683 - RNA, 23 nt, synthetic construct
  source 1..23: mol_type = other RNA
atttagagaagcttttaggagtc

SEQ ID NO: 5684 - RNA, 23 nt, synthetic construct
  source 1..23: mol_type = other RNA
acatgtgaaggctggattggagg

SEQ ID NO: 5685 - RNA, 23 nt, synthetic construct
  source 1..23: mol_type = other RNA
agacaggttcgtattaaaaaaaa

SEQ ID NO: 5686 - RNA, 23 nt, synthetic construct
  source 1..23: mol_type = other RNA
aaatgataacatcaaagtgttac

SEQ ID NO: 5687 - RNA, 23 nt, synthetic construct
  source 1..23: mol_type = other RNA
agtatgctcaagttcaagctggg

SEQ ID NO: 5688 - RNA, 23 nt, synthetic construct
  source 1..23: mol_type = other RNA
attagcaaatcaaaagaagctga

SEQ ID NO: 5689 - RNA, 23 nt, synthetic construct
  source 1..23: mol_type = other RNA
acatgtgagcaagtgtgatgttt

SEQ ID NO: 5690 - RNA, 23 nt, synthetic construct
  source 1..23: mol_type = other RNA
atgaacagcataaacaggcatgt

SEQ ID NO: 5691 - RNA, 23 nt, synthetic construct
  source 1..23: mol_type = other RNA
agtaagaaacataaacaacatga

SEQ ID NO: 5692 - RNA, 23 nt, synthetic construct
  source 1..23: mol_type = other RNA
aagactatttattctaggtaaga

SEQ ID NO: 5693 - RNA, 23 nt, synthetic construct
  source 1..23: mol_type = other RNA
aagaagtcgggaaaagaagtagg

SEQ ID NO: 5694 - RNA, 23 nt, synthetic construct
  source 1..23: mol_type = other RNA
atgaatcttaggaaaaagtaaga

SEQ ID NO: 5695 - RNA, 23 nt, synthetic construct
  source 1..23: mol_type = other RNA
aggagcatgatgctgtacactga

SEQ ID NO: 5696 - RNA, 23 nt, synthetic construct
  source 1..23: mol_type = other RNA
aaggaaggtttgctgtggagcat

SEQ ID NO: 5697 - RNA, 23 nt, synthetic construct
  source 1..23: mol_type = other RNA
aattatgtaggttttgagaggga

SEQ ID NO: 5698 - RNA, 23 nt, synthetic construct
  source 1..23: mol_type = other RNA
aacaggagaggtaaatacaatct

SEQ ID NO: 5699 - RNA, 23 nt, synthetic construct
  source 1..23: mol_type = other RNA
aattttcaaaacaatgtggttga

SEQ ID NO: 5700 - RNA, 23 nt, synthetic construct
  source 1..23: mol_type = other RNA
aagaggagacacaaatagaaata

SEQ ID NO: 5701 - RNA, 23 nt, synthetic construct
  source 1..23: mol_type = other RNA
agacattatactgcagtagagga

SEQ ID NO: 5702 - RNA, 23 nt, synthetic construct
  source 1..23: mol_type = other RNA
agaatgcaatgatgaatacacag

SEQ ID NO: 5703 - RNA, 23 nt, synthetic construct
  source 1..23: mol_type = other RNA
atttatcaatgatatctccattc

SEQ ID NO: 5704 - RNA, 23 nt, synthetic construct
  source 1..23: mol_type = other RNA
agcttctgttatcaaaagggctt

SEQ ID NO: 5705 - RNA, 23 nt, synthetic construct
  source 1..23: mol_type = other RNA
aattaaaacaaggactatctggg

SEQ ID NO: 5706 - RNA, 23 nt, synthetic construct
  source 1..23: mol_type = other RNA
aagagcatcaagacagtggtgag

SEQ ID NO: 5707 - RNA, 23 nt, synthetic construct
  source 1..23: mol_type = other RNA
agaagaggtaacttgctcagagc

SEQ ID NO: 5708 - RNA, 23 nt, synthetic construct
  source 1..23: mol_type = other RNA
agaaactgagggtcagagggaag

SEQ ID NO: 5709 - RNA, 23 nt, synthetic construct
  source 1..23: mol_type = other RNA
acattttacaaatatggaaactg

SEQ ID NO: 5710 - RNA, 23 nt, synthetic construct
  source 1..23: mol_type = other RNA
agttggtatgtttattctcattt

SEQ ID NO: 5711 - RNA, 23 nt, synthetic construct
  source 1..23: mol_type = other RNA
acacaatatctttattaagttgg

SEQ ID NO: 5712 - RNA, 23 nt, synthetic construct
  source 1..23: mol_type = other RNA
atatcaaatatcattctagtcac

SEQ ID NO: 5713 - RNA, 23 nt, synthetic construct
  source 1..23: mol_type = other RNA
aactgctaccatttaatttctat

SEQ ID NO: 5714 - RNA, 23 nt, synthetic construct
  source 1..23: mol_type = other RNA
agatcagaatagttatactgcta

SEQ ID NO: 5715 - RNA, 23 nt, synthetic construct
  source 1..23: mol_type = other RNA
ataggaatattaatgtcagtgat

SEQ ID NO: 5716 - RNA, 23 nt, synthetic construct
  source 1..23: mol_type = other RNA
agtgagcaaagaataataacaat

SEQ ID NO: 5717 - RNA, 23 nt, synthetic construct
  source 1..23: mol_type = other RNA
aaacagcaaaacaagagttgtat

SEQ ID NO: 5718 - RNA, 23 nt, synthetic construct
  source 1..23: mol_type = other RNA
ataaacctacataaagagggcag

SEQ ID NO: 5719 - RNA, 23 nt, synthetic construct
  source 1..23: mol_type = other RNA
aagacatttgagtccgagtatat

SEQ ID NO: 5720 - RNA, 23 nt, synthetic construct
  source 1..23: mol_type = other RNA
aatgaccacttcatttggtgtct

SEQ ID NO: 5721 - RNA, 23 nt, synthetic construct
  source 1..23: mol_type = other RNA
aagaatatactgatttgctacta

SEQ ID NO: 5722 - RNA, 23 nt, synthetic construct
  source 1..23: mol_type = other RNA
agtgaagattaatattccttgaa

SEQ ID NO: 5723 - RNA, 23 nt, synthetic construct
  source 1..23: mol_type = other RNA
aaaaattcaaaatttgggtgaag

SEQ ID NO: 5724 - RNA, 23 nt, synthetic construct
  source 1..23: mol_type = other RNA
atttattcaatgaaatcactcga

SEQ ID NO: 5725 - RNA, 23 nt, synthetic construct
  source 1..23: mol_type = other RNA
aagaagtcagtagaattttattc

SEQ ID NO: 5726 - RNA, 21 nt, synthetic construct
  source 1..21: mol_type = other RNA
  modified_base 1: mod_base = OTHER; note = 2'-O-methylcytidine-3'-phosphorothioate
  modified_base 2: mod_base = OTHER; note = 2'-O-methyluridine-3'-phosphorothioate
  modified_base 3: mod_base = OTHER; note = 2'-O-methylguanosine-3'-phosphate
  modified_base 4: mod_base = OTHER; note = 2'-O-methylcytidine-3'-phosphate
  modified_base 5: mod_base = OTHER; note = 2'-O-methyluridine-3'-phosphate
  modified_base 6: mod_base = OTHER; note = 2'-O-methyluridine-3'-phosphate
  modified_base 7: mod_base = OTHER; note = 2'-deoxy-2'-fluorocytidine-3'-phosphate
  modified_base 8: mod_base = OTHER; note = 2'-O-methyluridine-3'-phosphate
  modified_base 9: mod_base = OTHER; note = 2'-deoxy-2'-fluoroadenosine-3'-phosphate
  modified_base 10: mod_base = OTHER; note = 2'-deoxy-2'-fluorocytidine-3'-phosphate
  modified_base 11: mod_base = OTHER; note = 2'-deoxy-2'-fluorouridine-3'-phosphate
  modified_base 12: mod_base = OTHER; note = 2'-O-methylcytidine-3'-phosphate
  modified_base 13: mod_base = OTHER; note = 2'-O-methylcytidine-3'-phosphate
  modified_base 14: mod_base = OTHER; note = 2'-O-methyluridine-3'-phosphate
  modified_base 15: mod_base = OTHER; note = 2'-O-methylcytidine-3'-phosphate
  modified_base 16: mod_base = OTHER; note = 2'-O-methylcytidine-3'-phosphate
  modified_base 17: mod_base = OTHER; note = 2'-O-methyluridine-3'-phosphate
  modified_base 18: mod_base = OTHER; note = 2'-O-methylguanosine-3'-phosphate
  modified_base 19: mod_base = OTHER; note = 2'-O-methylcytidine-3'-phosphate
  modified_base 20: mod_base = OTHER; note = 2'-O-methyluridine-3'-phosphate
  modified_base 21: mod_base = OTHER; note = 2'-O-methyluridine-3'-phosphate ((2S,4R)-1-[29-[[2-(acetylamino)-2-deoxy-beta-D-galactopyra nosyl]oxy]-14,14-bis[[3-[[3-[[5-[[2-(acetylamino)-2-deoxy-b eta-D-galactopyranosyl]oxy]-1-oxopentyl]amino]propyl]amino] -3-oxopropoxy]methyl]-1,12,19,25-tetraoxo-16-oxa-13,20,24-t riazanonacos-1-yl]-4-hydroxy-2-pyrrolidinyl)methyl ester
ctgcttctactcctcctgctt

SEQ ID NO: 5727 - RNA, 21 nt, synthetic construct
  source 1..21: mol_type = other RNA
  modified_base 1: mod_base = OTHER; note = 2'-O-methylguanosine-3'-phosphorothioate
  modified_base 2: mod_base = OTHER; note = 2'-O-methyluridine-3'-phosphorothioate
  modified_base 3: mod_base = OTHER; note = 2'-O-methylguanosine-3'-phosphate
  modified_base 4: mod_base = OTHER; note = 2'-O-methylcytidine-3'-phosphate
  modified_base 5: mod_base = OTHER; note = 2'-O-methylguanosine-3'-phosphate
  modified_base 6: mod_base = OTHER; note = 2'-O-methylguanosine-3'-phosphate
  modified_base 7: mod_base = OTHER; note = 2'-deoxy-2'-fluoroadenosine-3'-phosphate
  modified_base 8: mod_base = OTHER; note = 2'-O-methyluridine-3'-phosphate
  modified_base 9: mod_base = OTHER; note = 2'-deoxy-2'-fluorocytidine-3'-phosphate
  modified_base 10: mod_base = OTHER; note = 2'-deoxy-2'-fluoroguanosine-3'-phosphate
  modified_base 11: mod_base = OTHER; note = 2'-deoxy-2'-fluorouridine-3'-phosphate
  modified_base 12: mod_base = OTHER; note = 2'-O-methyluridine-3'-phosphate
  modified_base 13: mod_base = OTHER; note = 2'-O-methyluridine-3'-phosphate
  modified_base 14: mod_base = OTHER; note = 2'-O-methylcytidine-3'-phosphate
  modified_base 15: mod_base = OTHER; note = 2'-O-methylguanosine-3'-phosphate
  modified_base 16: mod_base = OTHER; note = 2'-O-methylcytidine-3'-phosphate
  modified_base 17: mod_base = OTHER; note = 2'-O-methyladenosine-3'-phosphate
  modified_base 18: mod_base = OTHER; note = 2'-O-methyladenosine-3'-phosphate
  modified_base 19: mod_base = OTHER; note = 2'-O-methylcytidine-3'-phosphate
  modified_base 20: mod_base = OTHER; note = 2'-O-methyluridine-3'-phosphate
  modified_base 21: mod_base = OTHER; note = 2'-O-methyluridine-3'-phosphate ((2S,4R)-1-[29-[[2-(acetylamino)-2-deoxy-beta-D-galactopyra nosyl]oxy]-14,14-bis[[3-[[3-[[5-[[2-(acetylamino)-2-deoxy-b eta-D-galactopyranosyl]oxy]-1-oxopentyl]amino]propyl]amino] -3-oxopropoxy]methyl]-1,12,19,25-tetraoxo-16-oxa-13,20,24-t riazanonacos-1-yl]-4-hydroxy-2-pyrrolidinyl)methyl ester
gtgcggatcgtttcgcaactt

SEQ ID NO: 5728 - RNA, 21 nt, synthetic construct
  source 1..21: mol_type = other RNA
  modified_base 1: mod_base = OTHER; note = 2'-O-methylcytidine-3'-phosphorothioate
  modified_base 2: mod_base = OTHER; note = 2'-O-methyladenosine-3'-phosphorothioate
  modified_base 3: mod_base = OTHER; note = 2'-O-methyladenosine-3'-phosphate
  modified_base 4: mod_base = OTHER; note = 2'-O-methylcytidine-3'-phosphate
  modified_base 5: mod_base = OTHER; note = 2'-O-methyluridine-3'-phosphate
  modified_base 6: mod_base = OTHER; note = 2'-O-methylguanosine-3'-phosphate
  modified_base 7: mod_base = OTHER; note = 2'-deoxy-2'-fluorocytidine-3'-phosphate
  modified_base 8: mod_base = OTHER; note = 2'-O-methyluridine-3'-phosphate
  modified_base 9: mod_base = OTHER; note = 2'-deoxy-2'-fluorouridine-3'-phosphate
  modified_base 10: mod_base = OTHER; note = 2'-deoxy-2'-fluoroguanosine-3'-phosphate
  modified_base 11: mod_base = OTHER; note = 2'-deoxy-2'-fluorocytidine-3'-phosphate
  modified_base 12: mod_base = OTHER; note = 2'-O-methylcytidine-3'-phosphate
  modified_base 13: mod_base = OTHER; note = 2'-O-methyladenosine-3'-phosphate
  modified_base 14: mod_base = OTHER; note = 2'-O-methylcytidine-3'-phosphate
  modified_base 15: mod_base = OTHER; note = 2'-O-methyluridine-3'-phosphate
  modified_base 16: mod_base = OTHER; note = 2'-O-methylcytidine-3'-phosphate
  modified_base 17: mod_base = OTHER; note = 2'-O-methylguanosine-3'-phosphate
  modified_base 18: mod_base = OTHER; note = 2'-O-methyluridine-3'-phosphate
  modified_base 19: mod_base = OTHER; note = 2'-O-methylcytidine-3'-phosphate
  modified_base 20: mod_base = OTHER; note = 2'-O-methylcytidine-3'-phosphate
  modified_base 21: mod_base = OTHER; note = 2'-O-methyluridine-3'-phosphate ((2S,4R)-1-[29-[[2-(acetylamino)-2-deoxy-beta-D-galactopyra nosyl]oxy]-14,14-bis[[3-[[3-[[5-[[2-(acetylamino)-2-deoxy-b eta-D-galactopyranosyl]oxy]-1-oxopentyl]amino]propyl]amino] -3-oxopropoxy]methyl]-1,12,19,25-tetraoxo-16-oxa-13,20,24-t riazanonacos-1-yl]-4-hydroxy-2-pyrrolidinyl)methyl ester
caactgcttgccactcgtcct

SEQ ID NO: 5729 - RNA, 21 nt, synthetic construct
  source 1..21: mol_type = other RNA
  modified_base 1: mod_base = OTHER; note = 2'-O-methylcytidine-3'-phosphorothioate
  modified_base 2: mod_base = OTHER; note = 2'-O-methyluridine-3'-phosphorothioate
  modified_base 3: mod_base = OTHER; note = 2'-O-methylguanosine-3'-phosphate
  modified_base 4: mod_base = OTHER; note = 2'-O-methylguanosine-3'-phosphate
  modified_base 5: mod_base = OTHER; note = 2'-O-methylcytidine-3'-phosphate
  modified_base 6: mod_base = OTHER; note = 2'-O-methyluridine-3'-phosphate
  modified_base 7: mod_base = OTHER; note = 2'-deoxy-2'-fluoroguanosine-3'-phosphate
  modified_base 8: mod_base = OTHER; note = 2'-O-methyluridine-3'-phosphate
  modified_base 9: mod_base = OTHER; note = 2'-deoxy-2'-fluorouridine-3'-phosphate
  modified_base 10: mod_base = OTHER; note = 2'-deoxy-2'-fluorouridine-3'-phosphate
  modified_base 11: mod_base = OTHER; note = 2'-deoxy-2'-fluorouridine-3'-phosphate
  modified_base 12: mod_base = OTHER; note = 2'-O-methyluridine-3'-phosphate
  modified_base 13: mod_base = OTHER; note = 2'-O-methylcytidine-3'-phosphate
  modified_base 14: mod_base = OTHER; note = 2'-O-methylcytidine-3'-phosphate
  modified_base 15: mod_base = OTHER; note = 2'-O-methyladenosine-3'-phosphate
  modified_base 16: mod_base = OTHER; note = 2'-O-methyluridine-3'-phosphate
  modified_base 17: mod_base = OTHER; note = 2'-O-methyluridine-3'-phosphate
  modified_base 18: mod_base = OTHER; note = 2'-O-methyluridine-3'-phosphate
  modified_base 19: mod_base = OTHER; note = 2'-O-methylcytidine-3'-phosphate
  modified_base 20: mod_base = OTHER; note = 2'-O-methylcytidine-3'-phosphate
  modified_base 21: mod_base = OTHER; note = 2'-O-methyluridine-3'-phosphate ((2S,4R)-1-[29-[[2-(acetylamino)-2-deoxy-beta-D-galactopyra nosyl]oxy]-14,14-bis[[3-[[3-[[5-[[2-(acetylamino)-2-deoxy-b eta-D-galactopyranosyl]oxy]-1-oxopentyl]amino]propyl]amino] -3-oxopropoxy]methyl]-1,12,19,25-tetraoxo-16-oxa-13,20,24-t riazanonacos-1-yl]-4-hydroxy-2-pyrrolidinyl)methyl ester
ctggctgtttttccatttcct

SEQ ID NO: 5730 - RNA, 21 nt, synthetic construct
  source 1..21: mol_type = other RNA
  modified_base 1: mod_base = OTHER; note = 2'-O-methylcytidine-3'-phosphorothioate
  modified_base 2: mod_base = OTHER; note = 2'-O-methylcytidine-3'-phosphorothioate
  modified_base 3: mod_base = OTHER; note = 2'-O-methyladenosine-3'-phosphate
  modified_base 4: mod_base = OTHER; note = 2'-O-methylcytidine-3'-phosphate
  modified_base 5: mod_base = OTHER; note = 2'-O-methylcytidine-3'-phosphate
  modified_base 6: mod_base = OTHER; note = 2'-O-methylcytidine-3'-phosphate
  modified_base 7: mod_base = OTHER; note = 2'-deoxy-2'-fluorouridine-3'-phosphate
  modified_base 8: mod_base = OTHER; note = 2'-O-methyluridine-3'-phosphate
  modified_base 9: mod_base = OTHER; note = 2'-deoxy-2'-fluorouridine-3'-phosphate
  modified_base 10: mod_base = OTHER; note = 2'-deoxy-2'-fluorocytidine-3'-phosphate
  modified_base 11: mod_base = OTHER; note = 2'-deoxy-2'-fluorouridine-3'-phosphate
  modified_base 12: mod_base = OTHER; note = 2'-O-methylguanosine-3'-phosphate
  modified_base 13: mod_base = OTHER; note = 2'-O-methylguanosine-3'-phosphate
  modified_base 14: mod_base = OTHER; note = 2'-O-methyluridine-3'-phosphate
  modified_base 15: mod_base = OTHER; note = 2'-O-methylcytidine-3'-phosphate
  modified_base 16: mod_base = OTHER; note = 2'-O-methyladenosine-3'-phosphate
  modified_base 17: mod_base = OTHER; note = 2'-O-methyluridine-3'-phosphate
  modified_base 18: mod_base = OTHER; note = 2'-O-methylcytidine-3'-phosphate
  modified_base 19: mod_base = OTHER; note = 2'-O-methyluridine-3'-phosphate
  modified_base 20: mod_base = OTHER; note = 2'-O-methylcytidine-3'-phosphate
  modified_base 21: mod_base = OTHER; note = 2'-O-methyluridine-3'-phosphate ((2S,4R)-1-[29-[[2-(acetylamino)-2-deoxy-beta-D-galactopyra nosyl]oxy]-14,14-bis[[3-[[3-[[5-[[2-(acetylamino)-2-deoxy-b eta-D-galactopyranosyl]oxy]-1-oxopentyl]amino]propyl]amino] -3-oxopropoxy]methyl]-1,12,19,25-tetraoxo-16-oxa-13,20,24-t riazanonacos-1-yl]-4-hydroxy-2-pyrrolidinyl)methyl ester
ccaccctttctggtcatctct

SEQ ID NO: 5731 - RNA, 21 nt, synthetic construct
  source 1..21: mol_type = other RNA
  modified_base 1: mod_base = OTHER; note = 2'-O-methyluridine-3'-phosphorothioate
  modified_base 2: mod_base = OTHER; note = 2'-O-methylguanosine-3'-phosphorothioate
  modified_base 3: mod_base = OTHER; note = 2'-O-methylguanosine-3'-phosphate
  modified_base 4: mod_base = OTHER; note = 2'-O-methylcytidine-3'-phosphate
  modified_base 5: mod_base = OTHER; note = 2'-O-methyluridine-3'-phosphate
  modified_base 6: mod_base = OTHER; note = 2'-O-methyluridine-3'-phosphate
  modified_base 7: mod_base = OTHER; note = 2'-deoxy-2'-fluorocytidine-3'-phosphate
  modified_base 8: mod_base = OTHER; note = 2'-O-methylguanosine-3'-phosphate
  modified_base 9: mod_base = OTHER; note = 2'-deoxy-2'-fluoroadenosine-3'-phosphate
  modified_base 10: mod_base = OTHER; note = 2'-deoxy-2'-fluorocytidine-3'-phosphate
  modified_base 11: mod_base = OTHER; note = 2'-deoxy-2'-fluorocytidine-3'-phosphate
  modified_base 12: mod_base = OTHER; note = 2'-O-methyladenosine-3'-phosphate
  modified_base 13: mod_base = OTHER; note = 2'-O-methylcytidine-3'-phosphate
  modified_base 14: mod_base = OTHER; note = 2'-O-methyladenosine-3'-phosphate
  modified_base 15: mod_base = OTHER; note = 2'-O-methyladenosine-3'-phosphate
  modified_base 16: mod_base = OTHER; note = 2'-O-methylcytidine-3'-phosphate
  modified_base 17: mod_base = OTHER; note = 2'-O-methylcytidine-3'-phosphate
  modified_base 18: mod_base = OTHER; note = 2'-O-methyluridine-3'-phosphate
  modified_base 19: mod_base = OTHER; note = 2'-O-methylguanosine-3'-phosphate
  modified_base 20: mod_base = OTHER; note = 2'-O-methylcytidine-3'-phosphate
  modified_base 21: mod_base = OTHER; note = 2'-O-methyluridine-3'-phosphate ((2S,4R)-1-[29-[[2-(acetylamino)-2-deoxy-beta-D-galactopyra nosyl]oxy]-14,14-bis[[3-[[3-[[5-[[2-(acetylamino)-2-deoxy-b eta-D-galactopyranosyl]oxy]-1-oxopentyl]amino]propyl]amino] -3-oxopropoxy]methyl]-1,12,19,25-tetraoxo-16-oxa-13,20,24-t riazanonacos-1-yl]-4-hydroxy-2-pyrrolidinyl)methyl ester
tggcttcgaccacaacctgct

SEQ ID NO: 5732 - RNA, 21 nt, synthetic construct
  source 1..21: mol_type = other RNA
  modified_base 1: mod_base = OTHER; note = 2'-O-methylguanosine-3'-phosphorothioate
  modified_base 2: mod_base = OTHER; note = 2'-O-methyladenosine-3'-phosphorothioate
  modified_base 3: mod_base = OTHER; note = 2'-O-methylcytidine-3'-phosphate
  modified_base 4: mod_base = OTHER; note = 2'-O-methylguanosine-3'-phosphate
  modified_base 5: mod_base = OTHER; note = 2'-O-methyladenosine-3'-phosphate
  modified_base 6: mod_base = OTHER; note = 2'-O-methylguanosine-3'-phosphate
  modified_base 7: mod_base = OTHER; note = 2'-deoxy-2'-fluorouridine-3'-phosphate
  modified_base 8: mod_base = OTHER; note = 2'-O-methyladenosine-3'-phosphate
  modified_base 9: mod_base = OTHER; note = 2'-deoxy-2'-fluorouridine-3'-phosphate
  modified_base 10: mod_base = OTHER; note = 2'-deoxy-2'-fluorocytidine-3'-phosphate
  modified_base 11: mod_base = OTHER; note = 2'-deoxy-2'-fluoroadenosine-3'-phosphate
  modified_base 12: mod_base = OTHER; note = 2'-O-methylguanosine-3'-phosphate
  modified_base 13: mod_base = OTHER; note = 2'-O-methylcytidine-3'-phosphate
  modified_base 14: mod_base = OTHER; note = 2'-O-methyluridine-3'-phosphate
  modified_base 15: mod_base = OTHER; note = 2'-O-methyluridine-3'-phosphate
  modified_base 16: mod_base = OTHER; note = 2'-O-methyluridine-3'-phosphate
  modified_base 17: mod_base = OTHER; note = 2'-O-methyluridine-3'-phosphate
  modified_base 18: mod_base = OTHER; note = 2'-O-methylcytidine-3'-phosphate
  modified_base 19: mod_base = OTHER; note = 2'-O-methylguanosine-3'-phosphate
  modified_base 20: mod_base = OTHER; note = 2'-O-methyladenosine-3'-phosphate
  modified_base 21: mod_base = OTHER; note = 2'-O-methyluridine-3'-phosphate ((2S,4R)-1-[29-[[2-(acetylamino)-2-deoxy-beta-D-galactopyra nosyl]oxy]-14,14-bis[[3-[[3-[[5-[[2-(acetylamino)-2-deoxy-b eta-D-galactopyranosyl]oxy]-1-oxopentyl]amino]propyl]amino] -3-oxopropoxy]methyl]-1,12,19,25-tetraoxo-16-oxa-13,20,24-t riazanonacos-1-yl]-4-hydroxy-2-pyrrolidinyl)methyl ester
gacgagtatcagcttttcgat

SEQ ID NO: 5733 - RNA, 21 nt, synthetic construct
  source 1..21: mol_type = other RNA
  modified_base 1: mod_base = OTHER; note = 2'-O-methyluridine-3'-phosphorothioate
  modified_base 2: mod_base = OTHER; note = 2'-O-methyladenosine-3'-phosphorothioate
  modified_base 3: mod_base = OTHER; note = 2'-O-methyluridine-3'-phosphate
  modified_base 4: mod_base = OTHER; note = 2'-O-methylguanosine-3'-phosphate
  modified_base 5: mod_base = OTHER; note = 2'-O-methyladenosine-3'-phosphate
  modified_base 6: mod_base = OTHER; note = 2'-O-methyladenosine-3'-phosphate
  modified_base 7: mod_base = OTHER; note = 2'-deoxy-2'-fluoroadenosine-3'-phosphate
  modified_base 8: mod_base = OTHER; note = 2'-O-methyladenosine-3'-phosphate
  modified_base 9: mod_base = OTHER; note = 2'-deoxy-2'-fluorouridine-3'-phosphate
  modified_base 10: mod_base = OTHER; note = 2'-deoxy-2'-fluorouridine-3'-phosphate
  modified_base 11: mod_base = OTHER; note = 2'-deoxy-2'-fluorocytidine-3'-phosphate
  modified_base 12: mod_base = OTHER; note = 2'-O-methylcytidine-3'-phosphate
  modified_base 13: mod_base = OTHER; note = 2'-O-methyluridine-3'-phosphate
  modified_base 14: mod_base = OTHER; note = 2'-O-methyladenosine-3'-phosphate
  modified_base 15: mod_base = OTHER; note = 2'-O-methylcytidine-3'-phosphate
  modified_base 16: mod_base = OTHER; note = 2'-O-methyluridine-3'-phosphate
  modified_base 17: mod_base = OTHER; note = 2'-O-methylguanosine-3'-phosphate
  modified_base 18: mod_base = OTHER; note = 2'-O-methylguanosine-3'-phosphate
  modified_base 19: mod_base = OTHER; note = 2'-O-methyladenosine-3'-phosphate
  modified_base 20: mod_base = OTHER; note = 2'-O-methylcytidine-3'-phosphate
  modified_base 21: mod_base = OTHER; note = 2'-O-methyluridine-3'-phosphate ((2S,4R)-1-[29-[[2-(acetylamino)-2-deoxy-beta-D-galactopyra nosyl]oxy]-14,14-bis[[3-[[3-[[5-[[2-(acetylamino)-2-deoxy-b eta-D-galactopyranosyl]oxy]-1-oxopentyl]amino]propyl]amino] -3-oxopropoxy]methyl]-1,12,19,25-tetraoxo-16-oxa-13,20,24-t riazanonacos-1-yl]-4-hydroxy-2-pyrrolidinyl)methyl ester
tatgaaaattcctactggact

SEQ ID NO: 5734 - RNA, 21 nt, synthetic construct
  source 1..21: mol_type = other RNA
  modified_base 1: mod_base = OTHER; note = 2'-O-methylguanosine-3'-phosphorothioate
  modified_base 2: mod_base = OTHER; note = 2'-O-methylcytidine-3'-phosphorothioate
  modified_base 3: mod_base = OTHER; note = 2'-O-methyluridine-3'-phosphate
  modified_base 4: mod_base = OTHER; note = 2'-O-methylguanosine-3'-phosphate
  modified_base 5: mod_base = OTHER; note = 2'-O-methylcytidine-3'-phosphate
  modified_base 6: mod_base = OTHER; note = 2'-O-methylcytidine-3'-phosphate
  modified_base 7: mod_base = OTHER; note = 2'-deoxy-2'-fluoroadenosine-3'-phosphate
  modified_base 8: mod_base = OTHER; note = 2'-O-methyladenosine-3'-phosphate
  modified_base 9: mod_base = OTHER; note = 2'-deoxy-2'-fluoroadenosine-3'-phosphate
  modified_base 10: mod_base = OTHER; note = 2'-deoxy-2'-fluoroadenosine-3'-phosphate
  modified_base 11: mod_base = OTHER; note = 2'-deoxy-2'-fluorouridine-3'-phosphate
  modified_base 12: mod_base = OTHER; note = 2'-O-methyluridine-3'-phosphate
  modified_base 13: mod_base = OTHER; note = 2'-O-methyladenosine-3'-phosphate
  modified_base 14: mod_base = OTHER; note = 2'-O-methyluridine-3'-phosphate
  modified_base 15: mod_base = OTHER; note = 2'-O-methylcytidine-3'-phosphate
  modified_base 16: mod_base = OTHER; note = 2'-O-methyladenosine-3'-phosphate
  modified_base 17: mod_base = OTHER; note = 2'-O-methyladenosine-3'-phosphate
  modified_base 18: mod_base = OTHER; note = 2'-O-methylcytidine-3'-phosphate
  modified_base 19: mod_base = OTHER; note = 2'-O-methyladenosine-3'-phosphate
  modified_base 20: mod_base = OTHER; note = 2'-O-methylcytidine-3'-phosphate
  modified_base 21: mod_base = OTHER; note = 2'-O-methyluridine-3'-phosphate ((2S,4R)-1-[29-[[2-(acetylamino)-2-deoxy-beta-D-galactopyra nosyl]oxy]-14,14-bis[[3-[[3-[[5-[[2-(acetylamino)-2-deoxy-b eta-D-galactopyranosyl]oxy]-1-oxopentyl]amino]propyl]amino] -3-oxopropoxy]methyl]-1,12,19,25-tetraoxo-16-oxa-13,20,24-t riazanonacos-1-yl]-4-hydroxy-2-pyrrolidinyl)methyl ester
gctgccaaaattatcaacact

SEQ ID NO: 5735 - RNA, 21 nt, synthetic construct
  source 1..21: mol_type = other RNA
  modified_base 1: mod_base = OTHER; note = 2'-O-methylcytidine-3'-phosphorothioate
  modified_base 2: mod_base = OTHER; note = 2'-O-methyluridine-3'-phosphorothioate
  modified_base 3: mod_base = OTHER; note = 2'-O-methylguanosine-3'-phosphate
  modified_base 4: mod_base = OTHER; note = 2'-O-methylcytidine-3'-phosphate
  modified_base 5: mod_base = OTHER; note = 2'-O-methyluridine-3'-phosphate
  modified_base 6: mod_base = OTHER; note = 2'-O-methyladenosine-3'-phosphate
  modified_base 7: mod_base = OTHER; note = 2'-deoxy-2'-fluoroguanosine-3'-phosphate
  modified_base 8: mod_base = OTHER; note = 2'-O-methylguanosine-3'-phosphate
  modified_base 9: mod_base = OTHER; note = 2'-deoxy-2'-fluoroguanosine-3'-phosphate
  modified_base 10: mod_base = OTHER; note = 2'-deoxy-2'-fluoroadenosine-3'-phosphate
  modified_base 11: mod_base = OTHER; note = 2'-deoxy-2'-fluorouridine-3'-phosphate
  modified_base 12: mod_base = OTHER; note = 2'-O-methylcytidine-3'-phosphate
  modified_base 13: mod_base = OTHER; note = 2'-O-methyladenosine-3'-phosphate
  modified_base 14: mod_base = OTHER; note = 2'-O-methyluridine-3'-phosphate
  modified_base 15: mod_base = OTHER; note = 2'-O-methylcytidine-3'-phosphate
  modified_base 16: mod_base = OTHER; note = 2'-O-methyladenosine-3'-phosphate
  modified_base 17: mod_base = OTHER; note = 2'-O-methylguanosine-3'-phosphate
  modified_base 18: mod_base = OTHER; note = 2'-O-methyladenosine-3'-phosphate
  modified_base 19: mod_base = OTHER; note = 2'-O-methyladenosine-3'-phosphate
  modified_base 20: mod_base = OTHER; note = 2'-O-methyladenosine-3'-phosphate
  modified_base 21: mod_base = OTHER; note = 2'-O-methyluridine-3'-phosphate ((2S,4R)-1-[29-[[2-(acetylamino)-2-deoxy-beta-D-galactopyra nosyl]oxy]-14,14-bis[[3-[[3-[[5-[[2-(acetylamino)-2-deoxy-b eta-D-galactopyranosyl]oxy]-1-oxopentyl]amino]propyl]amino] -3-oxopropoxy]methyl]-1,12,19,25-tetraoxo-16-oxa-13,20,24-t riazanonacos-1-yl]-4-hydroxy-2-pyrrolidinyl)methyl ester
ctgctagggatcatcagaaat

SEQ ID NO: 5736 - RNA, 21 nt, synthetic construct
  source 1..21: mol_type = other RNA
  modified_base 1: mod_base = OTHER; note = 2'-O-methyladenosine-3'-phosphorothioate
  modified_base 2: mod_base = OTHER; note = 2'-O-methyladenosine-3'-phosphorothioate
  modified_base 3: mod_base = OTHER; note = 2'-O-methyluridine-3'-phosphate
  modified_base 4: mod_base = OTHER; note = 2'-O-methylcytidine-3'-phosphate
  modified_base 5: mod_base = OTHER; note = 2'-O-methyluridine-3'-phosphate
  modified_base 6: mod_base = OTHER; note = 2'-O-methylguanosine-3'-phosphate
  modified_base 7: mod_base = OTHER; note = 2'-deoxy-2'-fluorocytidine-3'-phosphate
  modified_base 8: mod_base = OTHER; note = 2'-O-methylcytidine-3'-phosphate
  modified_base 9: mod_base = OTHER; note = 2'-deoxy-2'-fluoroguanosine-3'-phosphate
  modified_base 10: mod_base = OTHER; note = 2'-deoxy-2'-fluorouridine-3'-phosphate
  modified_base 11: mod_base = OTHER; note = 2'-deoxy-2'-fluorocytidine-3'-phosphate
  modified_base 12: mod_base = OTHER; note = 2'-O-methyluridine-3'-phosphate
  modified_base 13: mod_base = OTHER; note = 2'-O-methyluridine-3'-phosphate
  modified_base 14: mod_base = OTHER; note = 2'-O-methyluridine-3'-phosphate
  modified_base 15: mod_base = OTHER; note = 2'-O-methyluridine-3'-phosphate
  modified_base 16: mod_base = OTHER; note = 2'-O-methylguanosine-3'-phosphate
  modified_base 17: mod_base = OTHER; note = 2'-O-methyladenosine-3'-phosphate
  modified_base 18: mod_base = OTHER; note = 2'-O-methyladenosine-3'-phosphate
  modified_base 19: mod_base = OTHER; note = 2'-O-methylguanosine-3'-phosphate
  modified_base 20: mod_base = OTHER; note = 2'-O-methylcytidine-3'-phosphate
  modified_base 21: mod_base = OTHER; note = 2'-O-methyluridine-3'-phosphate ((2S,4R)-1-[29-[[2-(acetylamino)-2-deoxy-beta-D-galactopyra nosyl]oxy]-14,14-bis[[3-[[3-[[5-[[2-(acetylamino)-2-deoxy-b eta-D-galactopyranosyl]oxy]-1-oxopentyl]amino]propyl]amino] -3-oxopropoxy]methyl]-1,12,19,25-tetraoxo-16-oxa-13,20,24-t riazanonacos-1-yl]-4-hydroxy-2-pyrrolidinyl)methyl ester
aatctgccgtcttttgaagct

SEQ ID NO: 5737 - RNA, 21 nt, synthetic construct
  source 1..21: mol_type = other RNA
  modified_base 1: mod_base = OTHER; note = 2'-O-methylcytidine-3'-phosphorothioate
  modified_base 2: mod_base = OTHER; note = 2'-O-methylcytidine-3'-phosphorothioate
  modified_base 3: mod_base = OTHER; note = 2'-O-methyluridine-3'-phosphate
  modified_base 4: mod_base = OTHER; note = 2'-O-methyladenosine-3'-phosphate
  modified_base 5: mod_base = OTHER; note = 2'-O-methyladenosine-3'-phosphate
  modified_base 6: mod_base = OTHER; note = 2'-O-methyluridine-3'-phosphate
  modified_base 7: mod_base = OTHER; note = 2'-deoxy-2'-fluoroadenosine-3'-phosphate
  modified_base 8: mod_base = OTHER; note = 2'-O-methyluridine-3'-phosphate
  modified_base 9: mod_base = OTHER; note = 2'-deoxy-2'-fluorouridine-3'-phosphate
  modified_base 10: mod_base = OTHER; note = 2'-deoxy-2'-fluoroguanosine-3'-phosphate
  modified_base 11: mod_base = OTHER; note = 2'-deoxy-2'-fluorouridine-3'-phosphate
  modified_base 12: mod_base = OTHER; note = 2'-O-methylguanosine-3'-phosphate
  modified_base 13: mod_base = OTHER; note = 2'-O-methylcytidine-3'-phosphate
  modified_base 14: mod_base = OTHER; note = 2'-O-methylguanosine-3'-phosphate
  modified_base 15: mod_base = OTHER; note = 2'-O-methyladenosine-3'-phosphate
  modified_base 16: mod_base = OTHER; note = 2'-O-methylcytidine-3'-phosphate
  modified_base 17: mod_base = OTHER; note = 2'-O-methyluridine-3'-phosphate
  modified_base 18: mod_base = OTHER; note = 2'-O-methyluridine-3'-phosphate
  modified_base 19: mod_base = OTHER; note = 2'-O-methylcytidine-3'-phosphate
  modified_base 20: mod_base = OTHER; note = 2'-O-methyladenosine-3'-phosphate
  modified_base 21: mod_base = OTHER; note = 2'-O-methyluridine-3'-phosphate ((2S,4R)-1-[29-[[2-(acetylamino)-2-deoxy-beta-D-galactopyra nosyl]oxy]-14,14-bis[[3-[[3-[[5-[[2-(acetylamino)-2-deoxy-b eta-D-galactopyranosyl]oxy]-1-oxopentyl]amino]propyl]amino] -3-oxopropoxy]methyl]-1,12,19,25-tetraoxo-16-oxa-13,20,24-t riazanonacos-1-yl]-4-hydroxy-2-pyrrolidinyl)methyl ester
cctaatattgtgcgacttcat

SEQ ID NO: 5738 - RNA, 21 nt, synthetic construct
  source 1..21: mol_type = other RNA
  modified_base 1: mod_base = OTHER; note = 2'-O-methyluridine-3'-phosphorothioate
  modified_base 2: mod_base = OTHER; note = 2'-O-methyluridine-3'-phosphorothioate
  modified_base 3: mod_base = OTHER; note = 2'-O-methylguanosine-3'-phosphate
  modified_base 4: mod_base = OTHER; note = 2'-O-methylguanosine-3'-phosphate
  modified_base 5: mod_base = OTHER; note = 2'-O-methyluridine-3'-phosphate
  modified_base 6: mod_base = OTHER; note = 2'-O-methylguanosine-3'-phosphate
  modified_base 7: mod_base = OTHER; note = 2'-deoxy-2'-fluorouridine-3'-phosphate
  modified_base 8: mod_base = OTHER; note = 2'-O-methyluridine-3'-phosphate
  modified_base 9: mod_base = OTHER; note = 2'-deoxy-2'-fluorouridine-3'-phosphate
  modified_base 10: mod_base = OTHER; note = 2'-deoxy-2'-fluoroguanosine-3'-phosphate
  modified_base 11: mod_base = OTHER; note = 2'-deoxy-2'-fluoroadenosine-3'-phosphate
  modified_base 12: mod_base = OTHER; note = 2'-O-methyluridine-3'-phosphate
  modified_base 13: mod_base = OTHER; note = 2'-O-methyluridine-3'-phosphate
  modified_base 14: mod_base = OTHER; note = 2'-O-methyluridine-3'-phosphate
  modified_base 15: mod_base = OTHER; note = 2'-O-methyladenosine-3'-phosphate
  modified_base 16: mod_base = OTHER; note = 2'-O-methylguanosine-3'-phosphate
  modified_base 17: mod_base = OTHER; note = 2'-O-methyluridine-3'-phosphate
  modified_base 18: mod_base = OTHER; note = 2'-O-methyluridine-3'-phosphate
  modified_base 19: mod_base = OTHER; note = 2'-O-methyladenosine-3'-phosphate
  modified_base 20: mod_base = OTHER; note = 2'-O-methylcytidine-3'-phosphate
  modified_base 21: mod_base = OTHER; note = 2'-O-methyluridine-3'-phosphate ((2S,4R)-1-[29-[[2-(acetylamino)-2-deoxy-beta-D-galactopyra nosyl]oxy]-14,14-bis[[3-[[3-[[5-[[2-(acetylamino)-2-deoxy-b eta-D-galactopyranosyl]oxy]-1-oxopentyl]amino]propyl]amino] -3-oxopropoxy]methyl]-1,12,19,25-tetraoxo-16-oxa-13,20,24-t riazanonacos-1-yl]-4-hydroxy-2-pyrrolidinyl)methyl ester
ttggtgtttgatttagttact

SEQ ID NO: 5739 - RNA, 21 nt, synthetic construct
  source 1..21: mol_type = other RNA
  modified_base 1: mod_base = OTHER; note = 2'-O-methyluridine-3'-phosphorothioate
  modified_base 2: mod_base = OTHER; note = 2'-O-methyladenosine-3'-phosphorothioate
  modified_base 3: mod_base = OTHER; note = 2'-O-methylcytidine-3'-phosphate
  modified_base 4: mod_base = OTHER; note = 2'-O-methyladenosine-3'-phosphate
  modified_base 5: mod_base = OTHER; note = 2'-O-methylguanosine-3'-phosphate
  modified_base 6: mod_base = OTHER; note = 2'-O-methyluridine-3'-phosphate
  modified_base 7: mod_base = OTHER; note = 2'-deoxy-2'-fluoroguanosine-3'-phosphate
  modified_base 8: mod_base = OTHER; note = 2'-O-methyladenosine-3'-phosphate
  modified_base 9: mod_base = OTHER; note = 2'-deoxy-2'-fluoroadenosine-3'-phosphate
  modified_base 10: mod_base = OTHER; note = 2'-deoxy-2'-fluoroguanosine-3'-phosphate
  modified_base 11: mod_base = OTHER; note = 2'-deoxy-2'-fluorocytidine-3'-phosphate
  modified_base 12: mod_base = OTHER; note = 2'-O-methyluridine-3'-phosphate
  modified_base 13: mod_base = OTHER; note = 2'-O-methylguanosine-3'-phosphate
  modified_base 14: mod_base = OTHER; note = 2'-O-methyladenosine-3'-phosphate
  modified_base 15: mod_base = OTHER; note = 2'-O-methyluridine-3'-phosphate
  modified_base 16: mod_base = OTHER; note = 2'-O-methylguanosine-3'-phosphate
  modified_base 17: mod_base = OTHER; note = 2'-O-methylcytidine-3'-phosphate
  modified_base 18: mod_base = OTHER; note = 2'-O-methylcytidine-3'-phosphate
  modified_base 19: mod_base = OTHER; note = 2'-O-methyladenosine-3'-phosphate
  modified_base 20: mod_base = OTHER; note = 2'-O-methylguanosine-3'-phosphate
  modified_base 21: mod_base = OTHER; note = 2'-O-methyluridine-3'-phosphate ((2S,4R)-1-[29-[[2-(acetylamino)-2-deoxy-beta-D-galactopyra nosyl]oxy]-14,14-bis[[3-[[3-[[5-[[2-(acetylamino)-2-deoxy-b eta-D-galactopyranosyl]oxy]-1-oxopentyl]amino]propyl]amino] -3-oxopropoxy]methyl]-1,12,19,25-tetraoxo-16-oxa-13,20,24-t riazanonacos-1-yl]-4-hydroxy-2-pyrrolidinyl)methyl ester
tacagtgaagctgatgccagt

SEQ ID NO: 5740 - RNA, 21 nt, synthetic construct
  source 1..21: mol_type = other RNA
  modified_base 1: mod_base = OTHER; note = 2'-O-methylcytidine-3'-phosphorothioate
  modified_base 2: mod_base = OTHER; note = 2'-O-methylcytidine-3'-phosphorothioate
  modified_base 3: mod_base = OTHER; note = 2'-O-methyladenosine-3'-phosphate
  modified_base 4: mod_base = OTHER; note = 2'-O-methylguanosine-3'-phosphate
  modified_base 5: mod_base = OTHER; note = 2'-O-methyluridine-3'-phosphate
  modified_base 6: mod_base = OTHER; note = 2'-O-methylcytidine-3'-phosphate
  modified_base 7: mod_base = OTHER; note = 2'-deoxy-2'-fluoroadenosine-3'-phosphate
  modified_base 8: mod_base = OTHER; note = 2'-O-methyluridine-3'-phosphate
  modified_base 9: mod_base = OTHER; note = 2'-deoxy-2'-fluorouridine-3'-phosphate
  modified_base 10: mod_base = OTHER; note = 2'-deoxy-2'-fluoroguanosine-3'-phosphate
  modified_base 11: mod_base = OTHER; note = 2'-deoxy-2'-fluorocytidine-3'-phosphate
  modified_base 12: mod_base = OTHER; note = 2'-O-methyladenosine-3'-phosphate
  modified_base 13: mod_base = OTHER; note = 2'-O-methyluridine-3'-phosphate
  modified_base 14: mod_base = OTHER; note = 2'-O-methyluridine-3'-phosphate
  modified_base 15: mod_base = OTHER; note = 2'-O-methylcytidine-3'-phosphate
  modified_base 16: mod_base = OTHER; note = 2'-O-methyladenosine-3'-phosphate
  modified_base 17: mod_base = OTHER; note = 2'-O-methylguanosine-3'-phosphate
  modified_base 18: mod_base = OTHER; note = 2'-O-methylcytidine-3'-phosphate
  modified_base 19: mod_base = OTHER; note = 2'-O-methyladenosine-3'-phosphate
  modified_base 20: mod_base = OTHER; note = 2'-O-methylguanosine-3'-phosphate
  modified_base 21: mod_base = OTHER; note = 2'-O-methyluridine-3'-phosphate ((2S,4R)-1-[29-[[2-(acetylamino)-2-deoxy-beta-D-galactopyra nosyl]oxy]-14,14-bis[[3-[[3-[[5-[[2-(acetylamino)-2-deoxy-b eta-D-galactopyranosyl]oxy]-1-oxopentyl]amino]propyl]amino] -3-oxopropoxy]methyl]-1,12,19,25-tetraoxo-16-oxa-13,20,24-t riazanonacos-1-yl]-4-hydroxy-2-pyrrolidinyl)methyl ester
ccagtcattgcattcagcagt

SEQ ID NO: 5741 - RNA, 21 nt, synthetic construct
  source 1..21: mol_type = other RNA
  modified_base 1: mod_base = OTHER; note = 2'-O-methylguanosine-3'-phosphorothioate
  modified_base 2: mod_base = OTHER; note = 2'-O-methylcytidine-3'-phosphorothioate
  modified_base 3: mod_base = OTHER; note = 2'-O-methylcytidine-3'-phosphate
  modified_base 4: mod_base = OTHER; note = 2'-O-methyluridine-3'-phosphate
  modified_base 5: mod_base = OTHER; note = 2'-O-methylguanosine-3'-phosphate
  modified_base 6: mod_base = OTHER; note = 2'-O-methyladenosine-3'-phosphate
  modified_base 7: mod_base = OTHER; note = 2'-deoxy-2'-fluoroguanosine-3'-phosphate
  modified_base 8: mod_base = OTHER; note = 2'-O-methyladenosine-3'-phosphate
  modified_base 9: mod_base = OTHER; note = 2'-deoxy-2'-fluoroadenosine-3'-phosphate
  modified_base 10: mod_base = OTHER; note = 2'-deoxy-2'-fluorouridine-3'-phosphate
  modified_base 11: mod_base = OTHER; note = 2'-deoxy-2'-fluorouridine-3'-phosphate
  modified_base 12: mod_base = OTHER; note = 2'-O-methyluridine-3'-phosphate
  modified_base 13: mod_base = OTHER; note = 2'-O-methylguanosine-3'-phosphate
  modified_base 14: mod_base = OTHER; note = 2'-O-methylcytidine-3'-phosphate
  modified_base 15: mod_base = OTHER; note = 2'-O-methyluridine-3'-phosphate
  modified_base 16: mod_base = OTHER; note = 2'-O-methyluridine-3'-phosphate
  modified_base 17: mod_base = OTHER; note = 2'-O-methyluridine-3'-phosphate
  modified_base 18: mod_base = OTHER; note = 2'-O-methyluridine-3'-phosphate
  modified_base 19: mod_base = OTHER; note = 2'-O-methyladenosine-3'-phosphate
  modified_base 20: mod_base = OTHER; note = 2'-O-methylguanosine-3'-phosphate
  modified_base 21: mod_base = OTHER; note = 2'-O-methyluridine-3'-phosphate ((2S,4R)-1-[29-[[2-(acetylamino)-2-deoxy-beta-D-galactopyra nosyl]oxy]-14,14-bis[[3-[[3-[[5-[[2-(acetylamino)-2-deoxy-b eta-D-galactopyranosyl]oxy]-1-oxopentyl]amino]propyl]amino] -3-oxopropoxy]methyl]-1,12,19,25-tetraoxo-16-oxa-13,20,24-t riazanonacos-1-yl]-4-hydroxy-2-pyrrolidinyl)methyl ester
gcctgagaatttgcttttagt

SEQ ID NO: 5742 - RNA, 21 nt, synthetic construct
  source 1..21: mol_type = other RNA
  modified_base 1: mod_base = OTHER; note = 2'-O-methylguanosine-3'-phosphorothioate
  modified_base 2: mod_base = OTHER; note = 2'-O-methylcytidine-3'-phosphorothioate
  modified_base 3: mod_base = OTHER; note = 2'-O-methyluridine-3'-phosphate
  modified_base 4: mod_base = OTHER; note = 2'-O-methylguanosine-3'-phosphate
  modified_base 5: mod_base = OTHER; note = 2'-O-methyluridine-3'-phosphate
  modified_base 6: mod_base = OTHER; note = 2'-O-methylguanosine-3'-phosphate
  modified_base 7: mod_base = OTHER; note = 2'-deoxy-2'-fluoroadenosine-3'-phosphate
  modified_base 8: mod_base = OTHER; note = 2'-O-methyladenosine-3'-phosphate
  modified_base 9: mod_base = OTHER; note = 2'-deoxy-2'-fluoroadenosine-3'-phosphate
  modified_base 10: mod_base = OTHER; note = 2'-deoxy-2'-fluorouridine-3'-phosphate
  modified_base 11: mod_base = OTHER; note = 2'-deoxy-2'-fluorouridine-3'-phosphate
  modified_base 12: mod_base = OTHER; note = 2'-O-methylguanosine-3'-phosphate
  modified_base 13: mod_base = OTHER; note = 2'-O-methylguanosine-3'-phosphate
  modified_base 14: mod_base = OTHER; note = 2'-O-methylcytidine-3'-phosphate
  modified_base 15: mod_base = OTHER; note = 2'-O-methyladenosine-3'-phosphate
  modified_base 16: mod_base = OTHER; note = 2'-O-methylguanosine-3'-phosphate
  modified_base 17: mod_base = OTHER; note = 2'-O-methyladenosine-3'-phosphate
  modified_base 18: mod_base = OTHER; note = 2'-O-methylcytidine-3'-phosphate
  modified_base 19: mod_base = OTHER; note = 2'-O-methyluridine-3'-phosphate
  modified_base 20: mod_base = OTHER; note = 2'-O-methyluridine-3'-phosphate
  modified_base 21: mod_base = OTHER; note = 2'-O-methyluridine-3'-phosphate ((2S,4R)-1-[29-[[2-(acetylamino)-2-deoxy-beta-D-galactopyra nosyl]oxy]-14,14-bis[[3-[[3-[[5-[[2-(acetylamino)-2-deoxy-b eta-D-galactopyranosyl]oxy]-1-oxopentyl]amino]propyl]amino] -3-oxopropoxy]methyl]-1,12,19,25-tetraoxo-16-oxa-13,20,24-t riazanonacos-1-yl]-4-hydroxy-2-pyrrolidinyl)methyl ester
gctgtgaaattggcagacttt

SEQ ID NO: 5743 - RNA, 21 nt, synthetic construct
  source 1..21: mol_type = other RNA
  modified_base 1: mod_base = OTHER; note = 2'-O-methyluridine-3'-phosphorothioate
  modified_base 2: mod_base = OTHER; note = 2'-O-methylcytidine-3'-phosphorothioate
  modified_base 3: mod_base = OTHER; note = 2'-O-methyluridine-3'-phosphate
  modified_base 4: mod_base = OTHER; note = 2'-O-methyluridine-3'-phosphate
  modified_base 5: mod_base = OTHER; note = 2'-O-methyluridine-3'-phosphate
  modified_base 6: mod_base = OTHER; note = 2'-O-methylcytidine-3'-phosphate
  modified_base 7: mod_base = OTHER; note = 2'-deoxy-2'-fluorouridine-3'-phosphate
  modified_base 8: mod_base = OTHER; note = 2'-O-methylcytidine-3'-phosphate
  modified_base 9: mod_base = OTHER; note = 2'-deoxy-2'-fluorocytidine-3'-phosphate
  modified_base 10: mod_base = OTHER; note = 2'-deoxy-2'-fluoroadenosine-3'-phosphate
  modified_base 11: mod_base = OTHER; note = 2'-deoxy-2'-fluoroguanosine-3'-phosphate
  modified_base 12: mod_base = OTHER; note = 2'-O-methyladenosine-3'-phosphate
  modified_base 13: mod_base = OTHER; note = 2'-O-methyladenosine-3'-phosphate
  modified_base 14: mod_base = OTHER; note = 2'-O-methylguanosine-3'-phosphate
  modified_base 15: mod_base = OTHER; note = 2'-O-methyluridine-3'-phosphate
  modified_base 16: mod_base = OTHER; note = 2'-O-methyluridine-3'-phosphate
  modified_base 17: mod_base = OTHER; note = 2'-O-methyluridine-3'-phosphate
  modified_base 18: mod_base = OTHER; note = 2'-O-methyluridine-3'-phosphate
  modified_base 19: mod_base = OTHER; note = 2'-O-methyladenosine-3'-phosphate
  modified_base 20: mod_base = OTHER; note = 2'-O-methylcytidine-3'-phosphate
  modified_base 21: mod_base = OTHER; note = 2'-O-methyluridine-3'-phosphate ((2S,4R)-1-[29-[[2-(acetylamino)-2-deoxy-beta-D-galactopyra nosyl]oxy]-14,14-bis[[3-[[3-[[5-[[2-(acetylamino)-2-deoxy-b eta-D-galactopyranosyl]oxy]-1-oxopentyl]amino]propyl]amino] -3-oxopropoxy]methyl]-1,12,19,25-tetraoxo-16-oxa-13,20,24-t riazanonacos-1-yl]-4-hydroxy-2-pyrrolidinyl)methyl ester
tctttctccagaagttttact

SEQ ID NO: 5744 - RNA, 21 nt, synthetic construct
  source 1..21: mol_type = other RNA
  modified_base 1: mod_base = OTHER; note = 2'-O-methyluridine-3'-phosphorothioate
  modified_base 2: mod_base = OTHER; note = 2'-O-methyluridine-3'-phosphorothioate
  modified_base 3: mod_base = OTHER; note = 2'-O-methyladenosine-3'-phosphate
  modified_base 4: mod_base = OTHER; note = 2'-O-methylcytidine-3'-phosphate
  modified_base 5: mod_base = OTHER; note = 2'-O-methylguanosine-3'-phosphate
  modified_base 6: mod_base = OTHER; note = 2'-O-methyluridine-3'-phosphate
  modified_base 7: mod_base = OTHER; note = 2'-deoxy-2'-fluoroadenosine-3'-phosphate
  modified_base 8: mod_base = OTHER; note = 2'-O-methyladenosine-3'-phosphate
  modified_base 9: mod_base = OTHER; note = 2'-deoxy-2'-fluoroadenosine-3'-phosphate
  modified_base 10: mod_base = OTHER; note = 2'-deoxy-2'-fluoroguanosine-3'-phosphate
  modified_base 11: mod_base = OTHER; note = 2'-deoxy-2'-fluoroadenosine-3'-phosphate
  modified_base 12: mod_base = OTHER; note = 2'-O-methyluridine-3'-phosphate
  modified_base 13: mod_base = OTHER; note = 2'-O-methylcytidine-3'-phosphate
  modified_base 14: mod_base = OTHER; note = 2'-O-methylcytidine-3'-phosphate
  modified_base 15: mod_base = OTHER; note = 2'-O-methyluridine-3'-phosphate
  modified_base 16: mod_base = OTHER; note = 2'-O-methyluridine-3'-phosphate
  modified_base 17: mod_base = OTHER; note = 2'-O-methyladenosine-3'-phosphate
  modified_base 18: mod_base = OTHER; note = 2'-O-methyluridine-3'-phosphate
  modified_base 19: mod_base = OTHER; note = 2'-O-methylguanosine-3'-phosphate
  modified_base 20: mod_base = OTHER; note = 2'-O-methylguanosine-3'-phosphate
  modified_base 21: mod_base = OTHER; note = 2'-O-methyluridine-3'-phosphate ((2S,4R)-1-[29-[[2-(acetylamino)-2-deoxy-beta-D-galactopyra nosyl]oxy]-14,14-bis[[3-[[3-[[5-[[2-(acetylamino)-2-deoxy-b eta-D-galactopyranosyl]oxy]-1-oxopentyl]amino]propyl]amino] -3-oxopropoxy]methyl]-1,12,19,25-tetraoxo-16-oxa-13,20,24-t riazanonacos-1-yl]-4-hydroxy-2-pyrrolidinyl)methyl ester
ttacgtaaagatccttatggt

SEQ ID NO: 5745 - RNA, 21 nt, synthetic construct
  source 1..21: mol_type = other RNA
  modified_base 1: mod_base = OTHER; note = 2'-O-methyladenosine-3'-phosphorothioate
  modified_base 2: mod_base = OTHER; note = 2'-O-methyluridine-3'-phosphorothioate
  modified_base 3: mod_base = OTHER; note = 2'-O-methyluridine-3'-phosphate
  modified_base 4: mod_base = OTHER; note = 2'-O-methylcytidine-3'-phosphate
  modified_base 5: mod_base = OTHER; note = 2'-O-methyluridine-3'-phosphate
  modified_base 6: mod_base = OTHER; note = 2'-O-methylcytidine-3'-phosphate
  modified_base 7: mod_base = OTHER; note = 2'-deoxy-2'-fluorouridine-3'-phosphate
  modified_base 8: mod_base = OTHER; note = 2'-O-methyladenosine-3'-phosphate
  modified_base 9: mod_base = OTHER; note = 2'-deoxy-2'-fluorouridine-3'-phosphate
  modified_base 10: mod_base = OTHER; note = 2'-deoxy-2'-fluoroadenosine-3'-phosphate
  modified_base 11: mod_base = OTHER; note = 2'-deoxy-2'-fluorouridine-3'-phosphate
  modified_base 12: mod_base = OTHER; note = 2'-O-methyluridine-3'-phosphate
  modified_base 13: mod_base = OTHER; note = 2'-O-methylcytidine-3'-phosphate
  modified_base 14: mod_base = OTHER; note = 2'-O-methyluridine-3'-phosphate
  modified_base 15: mod_base = OTHER; note = 2'-O-methyladenosine-3'-phosphate
  modified_base 16: mod_base = OTHER; note = 2'-O-methylcytidine-3'-phosphate
  modified_base 17: mod_base = OTHER; note = 2'-O-methyluridine-3'-phosphate
  modified_base 18: mod_base = OTHER; note = 2'-O-methyluridine-3'-phosphate
  modified_base 19: mod_base = OTHER; note = 2'-O-methylguanosine-3'-phosphate
  modified_base 20: mod_base = OTHER; note = 2'-O-methyluridine-3'-phosphate
  modified_base 21: mod_base = OTHER; note = 2'-O-methyluridine-3'-phosphate ((2S,4R)-1-[29-[[2-(acetylamino)-2-deoxy-beta-D-galactopyra nosyl]oxy]-14,14-bis[[3-[[3-[[5-[[2-(acetylamino)-2-deoxy-b eta-D-galactopyranosyl]oxy]-1-oxopentyl]amino]propyl]amino] -3-oxopropoxy]methyl]-1,12,19,25-tetraoxo-16-oxa-13,20,24-t riazanonacos-1-yl]-4-hydroxy-2-pyrrolidinyl)methyl ester
attctctatattctacttgtt

SEQ ID NO: 5746 - RNA, 21 nt, synthetic construct
  source 1..21: mol_type = other RNA
  modified_base 1: mod_base = OTHER; note = 2'-O-methylcytidine-3'-phosphorothioate
  modified_base 2: mod_base = OTHER; note = 2'-O-methylcytidine-3'-phosphorothioate
  modified_base 3: mod_base = OTHER; note = 2'-O-methyladenosine-3'-phosphate
  modified_base 4: mod_base = OTHER; note = 2'-O-methyladenosine-3'-phosphate
  modified_base 5: mod_base = OTHER; note = 2'-O-methylcytidine-3'-phosphate
  modified_base 6: mod_base = OTHER; note = 2'-O-methyladenosine-3'-phosphate
  modified_base 7: mod_base = OTHER; note = 2'-deoxy-2'-fluorocytidine-3'-phosphate
  modified_base 8: mod_base = OTHER; note = 2'-O-methyladenosine-3'-phosphate
  modified_base 9: mod_base = OTHER; note = 2'-deoxy-2'-fluoroguanosine-3'-phosphate
  modified_base 10: mod_base = OTHER; note = 2'-deoxy-2'-fluoroadenosine-3'-phosphate
  modified_base 11: mod_base = OTHER; note = 2'-deoxy-2'-fluorocytidine-3'-phosphate
  modified_base 12: mod_base = OTHER; note = 2'-O-methyluridine-3'-phosphate
  modified_base 13: mod_base = OTHER; note = 2'-O-methylcytidine-3'-phosphate
  modified_base 14: mod_base = OTHER; note = 2'-O-methyluridine-3'-phosphate
  modified_base 15: mod_base = OTHER; note = 2'-O-methyladenosine-3'-phosphate
  modified_base 16: mod_base = OTHER; note = 2'-O-methyluridine-3'-phosphate
  modified_base 17: mod_base = OTHER; note = 2'-O-methylcytidine-3'-phosphate
  modified_base 18: mod_base = OTHER; note = 2'-O-methyladenosine-3'-phosphate
  modified_base 19: mod_base = OTHER; note = 2'-O-methylguanosine-3'-phosphate
  modified_base 20: mod_base = OTHER; note = 2'-O-methylcytidine-3'-phosphate
  modified_base 21: mod_base = OTHER; note = 2'-O-methyluridine-3'-phosphate ((2S,4R)-1-[29-[[2-(acetylamino)-2-deoxy-beta-D-galactopyra nosyl]oxy]-14,14-bis[[3-[[3-[[5-[[2-(acetylamino)-2-deoxy-b eta-D-galactopyranosyl]oxy]-1-oxopentyl]amino]propyl]amino] -3-oxopropoxy]methyl]-1,12,19,25-tetraoxo-16-oxa-13,20,24-t riazanonacos-1-yl]-4-hydroxy-2-pyrrolidinyl)methyl ester
ccaacacagactctatcagct

SEQ ID NO: 5747 - RNA, 21 nt, synthetic construct
  source 1..21: mol_type = other RNA
  modified_base 1: mod_base = OTHER; note = 2'-O-methylguanosine-3'-phosphorothioate
  modified_base 2: mod_base = OTHER; note = 2'-O-methylguanosine-3'-phosphorothioate
  modified_base 3: mod_base = OTHER; note = 2'-O-methyladenosine-3'-phosphate
  modified_base 4: mod_base = OTHER; note = 2'-O-methylguanosine-3'-phosphate
  modified_base 5: mod_base = OTHER; note = 2'-O-methylcytidine-3'-phosphate
  modified_base 6: mod_base = OTHER; note = 2'-O-methyluridine-3'-phosphate
  modified_base 7: mod_base = OTHER; note = 2'-deoxy-2'-fluorouridine-3'-phosphate
  modified_base 8: mod_base = OTHER; note = 2'-O-methyladenosine-3'-phosphate
  modified_base 9: mod_base = OTHER; note = 2'-deoxy-2'-fluorouridine-3'-phosphate
  modified_base 10: mod_base = OTHER; note = 2'-deoxy-2'-fluoroguanosine-3'-phosphate
  modified_base 11: mod_base = OTHER; note = 2'-deoxy-2'-fluoroadenosine-3'-phosphate
  modified_base 12: mod_base = OTHER; note = 2'-O-methyluridine-3'-phosphate
  modified_base 13: mod_base = OTHER; note = 2'-O-methyluridine-3'-phosphate
  modified_base 14: mod_base = OTHER; note = 2'-O-methyluridine-3'-phosphate
  modified_base 15: mod_base = OTHER; note = 2'-O-methyluridine-3'-phosphate
  modified_base 16: mod_base = OTHER; note = 2'-O-methylcytidine-3'-phosphate
  modified_base 17: mod_base = OTHER; note = 2'-O-methylcytidine-3'-phosphate
  modified_base 18: mod_base = OTHER; note = 2'-O-methyladenosine-3'-phosphate
  modified_base 19: mod_base = OTHER; note = 2'-O-methyluridine-3'-phosphate
  modified_base 20: mod_base = OTHER; note = 2'-O-methylcytidine-3'-phosphate
  modified_base 21: mod_base = OTHER; note = 2'-O-methyluridine-3'-phosphate ((2S,4R)-1-[29-[[2-(acetylamino)-2-deoxy-beta-D-galactopyra nosyl]oxy]-14,14-bis[[3-[[3-[[5-[[2-(acetylamino)-2-deoxy-b eta-D-galactopyranosyl]oxy]-1-oxopentyl]amino]propyl]amino] -3-oxopropoxy]methyl]-1,12,19,25-tetraoxo-16-oxa-13,20,24-t riazanonacos-1-yl]-4-hydroxy-2-pyrrolidinyl)methyl ester
ggagcttatgattttccatct

SEQ ID NO: 5748 - RNA, 21 nt, synthetic construct
  source 1..21: mol_type = other RNA
  modified_base 1: mod_base = OTHER; note = 2'-O-methylcytidine-3'-phosphorothioate
  modified_base 2: mod_base = OTHER; note = 2'-O-methylcytidine-3'-phosphorothioate
  modified_base 3: mod_base = OTHER; note = 2'-O-methyluridine-3'-phosphate
  modified_base 4: mod_base = OTHER; note = 2'-O-methylcytidine-3'-phosphate
  modified_base 5: mod_base = OTHER; note = 2'-O-methyladenosine-3'-phosphate
  modified_base 6: mod_base = OTHER; note = 2'-O-methyluridine-3'-phosphate
  modified_base 7: mod_base = OTHER; note = 2'-deoxy-2'-fluorocytidine-3'-phosphate
  modified_base 8: mod_base = OTHER; note = 2'-O-methyladenosine-3'-phosphate
  modified_base 9: mod_base = OTHER; note = 2'-deoxy-2'-fluoroadenosine-3'-phosphate
  modified_base 10: mod_base = OTHER; note = 2'-deoxy-2'-fluorouridine-3'-phosphate
  modified_base 11: mod_base = OTHER; note = 2'-deoxy-2'-fluoroadenosine-3'-phosphate
  modified_base 12: mod_base = OTHER; note = 2'-O-methyladenosine-3'-phosphate
  modified_base 13: mod_base = OTHER; note = 2'-O-methyladenosine-3'-phosphate
  modified_base 14: mod_base = OTHER; note = 2'-O-methyladenosine-3'-phosphate
  modified_base 15: mod_base = OTHER; note = 2'-O-methyluridine-3'-phosphate
  modified_base 16: mod_base = OTHER; note = 2'-O-methylguanosine-3'-phosphate
  modified_base 17: mod_base = OTHER; note = 2'-O-methylcytidine-3'-phosphate
  modified_base 18: mod_base = OTHER; note = 2'-O-methyluridine-3'-phosphate
  modified_base 19: mod_base = OTHER; note = 2'-O-methyluridine-3'-phosphate
  modified_base 20: mod_base = OTHER; note = 2'-O-methyladenosine-3'-phosphate
  modified_base 21: mod_base = OTHER; note = 2'-O-methyluridine-3'-phosphate ((2S,4R)-1-[29-[[2-(acetylamino)-2-deoxy-beta-D-galactopyra nosyl]oxy]-14,14-bis[[3-[[3-[[5-[[2-(acetylamino)-2-deoxy-b eta-D-galactopyranosyl]oxy]-1-oxopentyl]amino]propyl]amino] -3-oxopropoxy]methyl]-1,12,19,25-tetraoxo-16-oxa-13,20,24-t riazanonacos-1-yl]-4-hydroxy-2-pyrrolidinyl)methyl ester
cctcatcaataaaatgcttat

SEQ ID NO: 5749 - RNA, 21 nt, synthetic construct
  source 1..21: mol_type = other RNA
  modified_base 1: mod_base = OTHER; note = 2'-O-methylcytidine-3'-phosphorothioate
  modified_base 2: mod_base = OTHER; note = 2'-O-methyladenosine-3'-phosphorothioate
  modified_base 3: mod_base = OTHER; note = 2'-O-methylcytidine-3'-phosphate
  modified_base 4: mod_base = OTHER; note = 2'-O-methylcytidine-3'-phosphate
  modified_base 5: mod_base = OTHER; note = 2'-O-methylcytidine-3'-phosphate
  modified_base 6: mod_base = OTHER; note = 2'-O-methyladenosine-3'-phosphate
  modified_base 7: mod_base = OTHER; note = 2'-deoxy-2'-fluorouridine-3'-phosphate
  modified_base 8: mod_base = OTHER; note = 2'-O-methylguanosine-3'-phosphate
  modified_base 9: mod_base = OTHER; note = 2'-deoxy-2'-fluoroguanosine-3'-phosphate
  modified_base 10: mod_base = OTHER; note = 2'-deoxy-2'-fluoroadenosine-3'-phosphate
  modified_base 11: mod_base = OTHER; note = 2'-deoxy-2'-fluorouridine-3'-phosphate
  modified_base 12: mod_base = OTHER; note = 2'-O-methylcytidine-3'-phosphate
  modified_base 13: mod_base = OTHER; note = 2'-O-methyluridine-3'-phosphate
  modified_base 14: mod_base = OTHER; note = 2'-O-methylguanosine-3'-phosphate
  modified_base 15: mod_base = OTHER; note = 2'-O-methyluridine-3'-phosphate
  modified_base 16: mod_base = OTHER; note = 2'-O-methylcytidine-3'-phosphate
  modified_base 17: mod_base = OTHER; note = 2'-O-methyladenosine-3'-phosphate
  modified_base 18: mod_base = OTHER; note = 2'-O-methyladenosine-3'-phosphate
  modified_base 19: mod_base = OTHER; note = 2'-O-methylcytidine-3'-phosphate
  modified_base 20: mod_base = OTHER; note = 2'-O-methylguanosine-3'-phosphate
  modified_base 21: mod_base = OTHER; note = 2'-O-methyluridine-3'-phosphate ((2S,4R)-1-[29-[[2-(acetylamino)-2-deoxy-beta-D-galactopyra nosyl]oxy]-14,14-bis[[3-[[3-[[5-[[2-(acetylamino)-2-deoxy-b eta-D-galactopyranosyl]oxy]-1-oxopentyl]amino]propyl]amino] -3-oxopropoxy]methyl]-1,12,19,25-tetraoxo-16-oxa-13,20,24-t riazanonacos-1-yl]-4-hydroxy-2-pyrrolidinyl)methyl ester
cacccatggatctgtcaacgt

SEQ ID NO: 5750 - RNA, 21 nt, synthetic construct
  source 1..21: mol_type = other RNA
  modified_base 1: mod_base = OTHER; note = 2'-O-methylcytidine-3'-phosphorothioate
  modified_base 2: mod_base = OTHER; note = 2'-O-methyladenosine-3'-phosphorothioate
  modified_base 3: mod_base = OTHER; note = 2'-O-methyladenosine-3'-phosphate
  modified_base 4: mod_base = OTHER; note = 2'-O-methylcytidine-3'-phosphate
  modified_base 5: mod_base = OTHER; note = 2'-O-methylguanosine-3'-phosphate
  modified_base 6: mod_base = OTHER; note = 2'-O-methyluridine-3'-phosphate
  modified_base 7: mod_base = OTHER; note = 2'-deoxy-2'-fluorouridine-3'-phosphate
  modified_base 8: mod_base = OTHER; note = 2'-O-methylcytidine-3'-phosphate
  modified_base 9: mod_base = OTHER; note = 2'-deoxy-2'-fluorouridine-3'-phosphate
  modified_base 10: mod_base = OTHER; note = 2'-deoxy-2'-fluoroadenosine-3'-phosphate
  modified_base 11: mod_base = OTHER; note = 2'-deoxy-2'-fluorocytidine-3'-phosphate
  modified_base 12: mod_base = OTHER; note = 2'-O-methyluridine-3'-phosphate
  modified_base 13: mod_base = OTHER; note = 2'-O-methylguanosine-3'-phosphate
  modified_base 14: mod_base = OTHER; note = 2'-O-methyluridine-3'-phosphate
  modified_base 15: mod_base = OTHER; note = 2'-O-methyluridine-3'-phosphate
  modified_base 16: mod_base = OTHER; note = 2'-O-methylguanosine-3'-phosphate
  modified_base 17: mod_base = OTHER; note = 2'-O-methylcytidine-3'-phosphate
  modified_base 18: mod_base = OTHER; note = 2'-O-methyluridine-3'-phosphate
  modified_base 19: mod_base = OTHER; note = 2'-O-methyluridine-3'-phosphate
  modified_base 20: mod_base = OTHER; note = 2'-O-methylcytidine-3'-phosphate
  modified_base 21: mod_base = OTHER; note = 2'-O-methyluridine-3'-phosphate ((2S,4R)-1-[29-[[2-(acetylamino)-2-deoxy-beta-D-galactopyra nosyl]oxy]-14,14-bis[[3-[[3-[[5-[[2-(acetylamino)-2-deoxy-b eta-D-galactopyranosyl]oxy]-1-oxopentyl]amino]propyl]amino] -3-oxopropoxy]methyl]-1,12,19,25-tetraoxo-16-oxa-13,20,24-t riazanonacos-1-yl]-4-hydroxy-2-pyrrolidinyl)methyl ester
caacgttctactgttgcttct

SEQ ID NO: 5751 - RNA, 21 nt, synthetic construct
  source 1..21: mol_type = other RNA
  modified_base 1: mod_base = OTHER; note = 2'-O-methylcytidine-3'-phosphorothioate
  modified_base 2: mod_base = OTHER; note = 2'-O-methyluridine-3'-phosphorothioate
  modified_base 3: mod_base = OTHER; note = 2'-O-methyluridine-3'-phosphate
  modified_base 4: mod_base = OTHER; note = 2'-O-methylcytidine-3'-phosphate
  modified_base 5: mod_base = OTHER; note = 2'-O-methylcytidine-3'-phosphate
  modified_base 6: mod_base = OTHER; note = 2'-O-methyladenosine-3'-phosphate
  modified_base 7: mod_base = OTHER; note = 2'-deoxy-2'-fluorouridine-3'-phosphate
  modified_base 8: mod_base = OTHER; note = 2'-O-methylguanosine-3'-phosphate
  modified_base 9: mod_base = OTHER; note = 2'-deoxy-2'-fluoroadenosine-3'-phosphate
  modified_base 10: mod_base = OTHER; note = 2'-deoxy-2'-fluorouridine-3'-phosphate
  modified_base 11: mod_base = OTHER; note = 2'-deoxy-2'-fluoroguanosine-3'-phosphate
  modified_base 12: mod_base = OTHER; note = 2'-O-methylcytidine-3'-phosphate
  modified_base 13: mod_base = OTHER; note = 2'-O-methyladenosine-3'-phosphate
  modified_base 14: mod_base = OTHER; note = 2'-O-methylcytidine-3'-phosphate
  modified_base 15: mod_base = OTHER; note = 2'-O-methyladenosine-3'-phosphate
  modified_base 16: mod_base = OTHER; note = 2'-O-methylguanosine-3'-phosphate
  modified_base 17: mod_base = OTHER; note = 2'-O-methyladenosine-3'-phosphate
  modified_base 18: mod_base = OTHER; note = 2'-O-methylcytidine-3'-phosphate
  modified_base 19: mod_base = OTHER; note = 2'-O-methyladenosine-3'-phosphate
  modified_base 20: mod_base = OTHER; note = 2'-O-methylguanosine-3'-phosphate
  modified_base 21: mod_base = OTHER; note = 2'-O-methyluridine-3'-phosphate ((2S,4R)-1-[29-[[2-(acetylamino)-2-deoxy-beta-D-galactopyra nosyl]oxy]-14,14-bis[[3-[[3-[[5-[[2-(acetylamino)-2-deoxy-b eta-D-galactopyranosyl]oxy]-1-oxopentyl]amino]propyl]amino] -3-oxopropoxy]methyl]-1,12,19,25-tetraoxo-16-oxa-13,20,24-t riazanonacos-1-yl]-4-hydroxy-2-pyrrolidinyl)methyl ester
cttccatgatgcacagacagt

SEQ ID NO: 5752 - RNA, 21 nt, synthetic construct
  source 1..21: mol_type = other RNA
  modified_base 1: mod_base = OTHER; note = 2'-O-methylcytidine-3'-phosphorothioate
  modified_base 2: mod_base = OTHER; note = 2'-O-methyluridine-3'-phosphorothioate
  modified_base 3: mod_base = OTHER; note = 2'-O-methylguanosine-3'-phosphate
  modified_base 4: mod_base = OTHER; note = 2'-O-methylcytidine-3'-phosphate
  modified_base 5: mod_base = OTHER; note = 2'-O-methyluridine-3'-phosphate
  modified_base 6: mod_base = OTHER; note = 2'-O-methyluridine-3'-phosphate
  modified_base 7: mod_base = OTHER; note = 2'-deoxy-2'-fluoroguanosine-3'-phosphate
  modified_base 8: mod_base = OTHER; note = 2'-O-methyladenosine-3'-phosphate
  modified_base 9: mod_base = OTHER; note = 2'-deoxy-2'-fluoroadenosine-3'-phosphate
  modified_base 10: mod_base = OTHER; note = 2'-deoxy-2'-fluoroguanosine-3'-phosphate
  modified_base 11: mod_base = OTHER; note = 2'-deoxy-2'-fluoroadenosine-3'-phosphate
  modified_base 12: mod_base = OTHER; note = 2'-O-methyladenosine-3'-phosphate
  modified_base 13: mod_base = OTHER; note = 2'-O-methyladenosine-3'-phosphate
  modified_base 14: mod_base = OTHER; note = 2'-O-methyluridine-3'-phosphate
  modified_base 15: mod_base = OTHER; note = 2'-O-methyluridine-3'-phosphate
  modified_base 16: mod_base = OTHER; note = 2'-O-methyluridine-3'-phosphate
  modified_base 17: mod_base = OTHER; note = 2'-O-methyladenosine-3'-phosphate
  modified_base 18: mod_base = OTHER; note = 2'-O-methyladenosine-3'-phosphate
  modified_base 19: mod_base = OTHER; note = 2'-O-methyluridine-3'-phosphate
  modified_base 20: mod_base = OTHER; note = 2'-O-methylguanosine-3'-phosphate
  modified_base 21: mod_base = OTHER; note = 2'-O-methyluridine-3'-phosphate ((2S,4R)-1-[29-[[2-(acetylamino)-2-deoxy-beta-D-galactopyra nosyl]oxy]-14,14-bis[[3-[[3-[[5-[[2-(acetylamino)-2-deoxy-b eta-D-galactopyranosyl]oxy]-1-oxopentyl]amino]propyl]amino] -3-oxopropoxy]methyl]-1,12,19,25-tetraoxo-16-oxa-13,20,24-t riazanonacos-1-yl]-4-hydroxy-2-pyrrolidinyl)methyl ester
ctgcttgaagaaatttaatgt

SEQ ID NO: 5753 - RNA, 21 nt, synthetic construct
  source 1..21: mol_type = other RNA
  modified_base 1: mod_base = OTHER; note = 2'-O-methyladenosine-3'-phosphorothioate
  modified_base 2: mod_base = OTHER; note = 2'-O-methyluridine-3'-phosphorothioate
  modified_base 3: mod_base = OTHER; note = 2'-O-methylguanosine-3'-phosphate
  modified_base 4: mod_base = OTHER; note = 2'-O-methylcytidine-3'-phosphate
  modified_base 5: mod_base = OTHER; note = 2'-O-methyluridine-3'-phosphate
  modified_base 6: mod_base = OTHER; note = 2'-O-methyladenosine-3'-phosphate
  modified_base 7: mod_base = OTHER; note = 2'-deoxy-2'-fluoroguanosine-3'-phosphate
  modified_base 8: mod_base = OTHER; note = 2'-O-methyladenosine-3'-phosphate
  modified_base 9: mod_base = OTHER; note = 2'-deoxy-2'-fluoroadenosine-3'-phosphate
  modified_base 10: mod_base = OTHER; note = 2'-deoxy-2'-fluoroguanosine-3'-phosphate
  modified_base 11: mod_base = OTHER; note = 2'-deoxy-2'-fluoroadenosine-3'-phosphate
  modified_base 12: mod_base = OTHER; note = 2'-O-methyladenosine-3'-phosphate
  modified_base 13: mod_base = OTHER; note = 2'-O-methyladenosine-3'-phosphate
  modified_base 14: mod_base = OTHER; note = 2'-O-methyladenosine-3'-phosphate
  modified_base 15: mod_base = OTHER; note = 2'-O-methylcytidine-3'-phosphate
  modified_base 16: mod_base = OTHER; note = 2'-O-methyluridine-3'-phosphate
  modified_base 17: mod_base = OTHER; note = 2'-O-methyladenosine-3'-phosphate
  modified_base 18: mod_base = OTHER; note = 2'-O-methyladenosine-3'-phosphate
  modified_base 19: mod_base = OTHER; note = 2'-O-methyladenosine-3'-phosphate
  modified_base 20: mod_base = OTHER; note = 2'-O-methylguanosine-3'-phosphate
  modified_base 21: mod_base = OTHER; note = 2'-O-methyluridine-3'-phosphate ((2S,4R)-1-[29-[[2-(acetylamino)-2-deoxy-beta-D-galactopyra nosyl]oxy]-14,14-bis[[3-[[3-[[5-[[2-(acetylamino)-2-deoxy-b eta-D-galactopyranosyl]oxy]-1-oxopentyl]amino]propyl]amino] -3-oxopropoxy]methyl]-1,12,19,25-tetraoxo-16-oxa-13,20,24-t riazanonacos-1-yl]-4-hydroxy-2-pyrrolidinyl)methyl ester
atgctagaagaaaactaaagt

SEQ ID NO: 5754 - RNA, 21 nt, synthetic construct
  source 1..21: mol_type = other RNA
  modified_base 1: mod_base = OTHER; note = 2'-O-methyluridine-3'-phosphorothioate
  modified_base 2: mod_base = OTHER; note = 2'-O-methylguanosine-3'-phosphorothioate
  modified_base 3: mod_base = OTHER; note = 2'-O-methylcytidine-3'-phosphate
  modified_base 4: mod_base = OTHER; note = 2'-O-methylcytidine-3'-phosphate
  modified_base 5: mod_base = OTHER; note = 2'-O-methyladenosine-3'-phosphate
  modified_base 6: mod_base = OTHER; note = 2'-O-methyluridine-3'-phosphate
  modified_base 7: mod_base = OTHER; note = 2'-deoxy-2'-fluorocytidine-3'-phosphate
  modified_base 8: mod_base = OTHER; note = 2'-O-methyluridine-3'-phosphate
  modified_base 9: mod_base = OTHER; note = 2'-deoxy-2'-fluorouridine-3'-phosphate
  modified_base 10: mod_base = OTHER; note = 2'-deoxy-2'-fluoroguanosine-3'-phosphate
  modified_base 11: mod_base = OTHER; note = 2'-deoxy-2'-fluoroadenosine-3'-phosphate
  modified_base 12: mod_base = OTHER; note = 2'-O-methylcytidine-3'-phosphate
  modified_base 13: mod_base = OTHER; note = 2'-O-methyladenosine-3'-phosphate
  modified_base 14: mod_base = OTHER; note = 2'-O-methyladenosine-3'-phosphate
  modified_base 15: mod_base = OTHER; note = 2'-O-methylcytidine-3'-phosphate
  modified_base 16: mod_base = OTHER; note = 2'-O-methyluridine-3'-phosphate
  modified_base 17: mod_base = OTHER; note = 2'-O-methyladenosine-3'-phosphate
  modified_base 18: mod_base = OTHER; note = 2'-O-methyluridine-3'-phosphate
  modified_base 19: mod_base = OTHER; note = 2'-O-methylguanosine-3'-phosphate
  modified_base 20: mod_base = OTHER; note = 2'-O-methylcytidine-3'-phosphate
  modified_base 21: mod_base = OTHER; note = 2'-O-methyluridine-3'-phosphate ((2S,4R)-1-[29-[[2-(acetylamino)-2-deoxy-beta-D-galactopyra nosyl]oxy]-14,14-bis[[3-[[3-[[5-[[2-(acetylamino)-2-deoxy-b eta-D-galactopyranosyl]oxy]-1-oxopentyl]amino]propyl]amino] -3-oxopropoxy]methyl]-1,12,19,25-tetraoxo-16-oxa-13,20,24-t riazanonacos-1-yl]-4-hydroxy-2-pyrrolidinyl)methyl ester
tgccatcttgacaactatgct

SEQ ID NO: 5755 - RNA, 21 nt, synthetic construct
  source 1..21: mol_type = other RNA
  modified_base 1: mod_base = OTHER; note = 2'-O-methylguanosine-3'-phosphorothioate
  modified_base 2: mod_base = OTHER; note = 2'-O-methylcytidine-3'-phosphorothioate
  modified_base 3: mod_base = OTHER; note = 2'-O-methyluridine-3'-phosphate
  modified_base 4: mod_base = OTHER; note = 2'-O-methylguanosine-3'-phosphate
  modified_base 5: mod_base = OTHER; note = 2'-O-methylguanosine-3'-phosphate
  modified_base 6: mod_base = OTHER; note = 2'-O-methylcytidine-3'-phosphate
  modified_base 7: mod_base = OTHER; note = 2'-deoxy-2'-fluorouridine-3'-phosphate
  modified_base 8: mod_base = OTHER; note = 2'-O-methyladenosine-3'-phosphate
  modified_base 9: mod_base = OTHER; note = 2'-deoxy-2'-fluorocytidine-3'-phosphate
  modified_base 10: mod_base = OTHER; note = 2'-deoxy-2'-fluoroadenosine-3'-phosphate
  modified_base 11: mod_base = OTHER; note = 2'-deoxy-2'-fluoroadenosine-3'-phosphate
  modified_base 12: mod_base = OTHER; note = 2'-O-methylguanosine-3'-phosphate
  modified_base 13: mod_base = OTHER; note = 2'-O-methylguanosine-3'-phosphate
  modified_base 14: mod_base = OTHER; note = 2'-O-methyladenosine-3'-phosphate
  modified_base 15: mod_base = OTHER; note = 2'-O-methyladenosine-3'-phosphate
  modified_base 16: mod_base = OTHER; note = 2'-O-methyluridine-3'-phosphate
  modified_base 17: mod_base = OTHER; note = 2'-O-methyluridine-3'-phosphate
  modified_base 18: mod_base = OTHER; note = 2'-O-methyluridine-3'-phosphate
  modified_base 19: mod_base = OTHER; note = 2'-O-methylcytidine-3'-phosphate
  modified_base 20: mod_base = OTHER; note = 2'-O-methyluridine-3'-phosphate
  modified_base 21: mod_base = OTHER; note = 2'-O-methyluridine-3'-phosphate ((2S,4R)-1-[29-[[2-(acetylamino)-2-deoxy-beta-D-galactopyra nosyl]oxy]-14,14-bis[[3-[[3-[[5-[[2-(acetylamino)-2-deoxy-b eta-D-galactopyranosyl]oxy]-1-oxopentyl]amino]propyl]amino] -3-oxopropoxy]methyl]-1,12,19,25-tetraoxo-16-oxa-13,20,24-t riazanonacos-1-yl]-4-hydroxy-2-pyrrolidinyl)methyl ester
gctggctacaaggaatttctt

SEQ ID NO: 5756 - RNA, 21 nt, synthetic construct
  source 1..21: mol_type = other RNA
  modified_base 1: mod_base = OTHER; note = 2'-O-methylcytidine-3'-phosphorothioate
  modified_base 2: mod_base = OTHER; note = 2'-O-methyladenosine-3'-phosphorothioate
  modified_base 3: mod_base = OTHER; note = 2'-O-methylguanosine-3'-phosphate
  modified_base 4: mod_base = OTHER; note = 2'-O-methylcytidine-3'-phosphate
  modified_base 5: mod_base = OTHER; note = 2'-O-methyladenosine-3'-phosphate
  modified_base 6: mod_base = OTHER; note = 2'-O-methylguanosine-3'-phosphate
  modified_base 7: mod_base = OTHER; note = 2'-deoxy-2'-fluorocytidine-3'-phosphate
  modified_base 8: mod_base = OTHER; note = 2'-O-methylcytidine-3'-phosphate
  modified_base 9: mod_base = OTHER; note = 2'-deoxy-2'-fluoroadenosine-3'-phosphate
  modified_base 10: mod_base = OTHER; note = 2'-deoxy-2'-fluoroadenosine-3'-phosphate
  modified_base 11: mod_base = OTHER; note = 2'-deoxy-2'-fluoroguanosine-3'-phosphate
  modified_base 12: mod_base = OTHER; note = 2'-O-methyladenosine-3'-phosphate
  modified_base 13: mod_base = OTHER; note = 2'-O-methylguanosine-3'-phosphate
  modified_base 14: mod_base = OTHER; note = 2'-O-methyluridine-3'-phosphate
  modified_base 15: mod_base = OTHER; note = 2'-O-methyluridine-3'-phosphate
  modified_base 16: mod_base = OTHER; note = 2'-O-methyluridine-3'-phosphate
  modified_base 17: mod_base = OTHER; note = 2'-O-methylguanosine-3'-phosphate
  modified_base 18: mod_base = OTHER; note = 2'-O-methyluridine-3'-phosphate
  modified_base 19: mod_base = OTHER; note = 2'-O-methyluridine-3'-phosphate
  modified_base 20: mod_base = OTHER; note = 2'-O-methylguanosine-3'-phosphate
  modified_base 21: mod_base = OTHER; note = 2'-O-methyluridine-3'-phosphate ((2S,4R)-1-[29-[[2-(acetylamino)-2-deoxy-beta-D-galactopyra nosyl]oxy]-14,14-bis[[3-[[3-[[5-[[2-(acetylamino)-2-deoxy-b eta-D-galactopyranosyl]oxy]-1-oxopentyl]amino]propyl]amino] -3-oxopropoxy]methyl]-1,12,19,25-tetraoxo-16-oxa-13,20,24-t riazanonacos-1-yl]-4-hydroxy-2-pyrrolidinyl)methyl ester
cagcagccaagagtttgttgt

SEQ ID NO: 5757 - RNA, 21 nt, synthetic construct
  source 1..21: mol_type = other RNA
  modified_base 1: mod_base = OTHER; note = 2'-O-methyladenosine-3'-phosphorothioate
  modified_base 2: mod_base = OTHER; note = 2'-O-methylguanosine-3'-phosphorothioate
  modified_base 3: mod_base = OTHER; note = 2'-O-methyladenosine-3'-phosphate
  modified_base 4: mod_base = OTHER; note = 2'-O-methyladenosine-3'-phosphate
  modified_base 5: mod_base = OTHER; note = 2'-O-methyladenosine-3'-phosphate
  modified_base 6: mod_base = OTHER; note = 2'-O-methylcytidine-3'-phosphate
  modified_base 7: mod_base = OTHER; note = 2'-deoxy-2'-fluorocytidine-3'-phosphate
  modified_base 8: mod_base = OTHER; note = 2'-O-methyladenosine-3'-phosphate
  modified_base 9: mod_base = OTHER; note = 2'-deoxy-2'-fluoroguanosine-3'-phosphate
  modified_base 10: mod_base = OTHER; note = 2'-deoxy-2'-fluoroadenosine-3'-phosphate
  modified_base 11: mod_base = OTHER; note = 2'-deoxy-2'-fluorouridine-3'-phosphate
  modified_base 12: mod_base = OTHER; note = 2'-O-methylguanosine-3'-phosphate
  modified_base 13: mod_base = OTHER; note = 2'-O-methylguanosine-3'-phosphate
  modified_base 14: mod_base = OTHER; note = 2'-O-methyladenosine-3'-phosphate
  modified_base 15: mod_base = OTHER; note = 2'-O-methylguanosine-3'-phosphate
  modified_base 16: mod_base = OTHER; note = 2'-O-methyluridine-3'-phosphate
  modified_base 17: mod_base = OTHER; note = 2'-O-methyladenosine-3'-phosphate
  modified_base 18: mod_base = OTHER; note = 2'-O-methyladenosine-3'-phosphate
  modified_base 19: mod_base = OTHER; note = 2'-O-methyladenosine-3'-phosphate
  modified_base 20: mod_base = OTHER; note = 2'-O-methylguanosine-3'-phosphate
  modified_base 21: mod_base = OTHER; note = 2'-O-methyluridine-3'-phosphate ((2S,4R)-1-[29-[[2-(acetylamino)-2-deoxy-beta-D-galactopyra nosyl]oxy]-14,14-bis[[3-[[3-[[5-[[2-(acetylamino)-2-deoxy-b eta-D-galactopyranosyl]oxy]-1-oxopentyl]amino]propyl]amino] -3-oxopropoxy]methyl]-1,12,19,25-tetraoxo-16-oxa-13,20,24-t riazanonacos-1-yl]-4-hydroxy-2-pyrrolidinyl)methyl ester
agaaaccagatggagtaaagt

SEQ ID NO: 5758 - RNA, 21 nt, synthetic construct
  source 1..21: mol_type = other RNA
  modified_base 1: mod_base = OTHER; note = 2'-O-methylguanosine-3'-phosphorothioate
  modified_base 2: mod_base = OTHER; note = 2'-O-methyladenosine-3'-phosphorothioate
  modified_base 3: mod_base = OTHER; note = 2'-O-methyluridine-3'-phosphate
  modified_base 4: mod_base = OTHER; note = 2'-O-methyladenosine-3'-phosphate
  modified_base 5: mod_base = OTHER; note = 2'-O-methyladenosine-3'-phosphate
  modified_base 6: mod_base = OTHER; note = 2'-O-methyladenosine-3'-phosphate
  modified_base 7: mod_base = OTHER; note = 2'-deoxy-2'-fluorocytidine-3'-phosphate
  modified_base 8: mod_base = OTHER; note = 2'-O-methyladenosine-3'-phosphate
  modified_base 9: mod_base = OTHER; note = 2'-deoxy-2'-fluoroadenosine-3'-phosphate
  modified_base 10: mod_base = OTHER; note = 2'-deoxy-2'-fluorocytidine-3'-phosphate
  modified_base 11: mod_base = OTHER; note = 2'-deoxy-2'-fluoroadenosine-3'-phosphate
  modified_base 12: mod_base = OTHER; note = 2'-O-methyladenosine-3'-phosphate
  modified_base 13: mod_base = OTHER; note = 2'-O-methyladenosine-3'-phosphate
  modified_base 14: mod_base = OTHER; note = 2'-O-methylguanosine-3'-phosphate
  modified_base 15: mod_base = OTHER; note = 2'-O-methylcytidine-3'-phosphate
  modified_base 16: mod_base = OTHER; note = 2'-O-methylcytidine-3'-phosphate
  modified_base 17: mod_base = OTHER; note = 2'-O-methyladenosine-3'-phosphate
  modified_base 18: mod_base = OTHER; note = 2'-O-methyladenosine-3'-phosphate
  modified_base 19: mod_base = OTHER; note = 2'-O-methylcytidine-3'-phosphate
  modified_base 20: mod_base = OTHER; note = 2'-O-methylguanosine-3'-phosphate
  modified_base 21: mod_base = OTHER; note = 2'-O-methyluridine-3'-phosphate ((2S,4R)-1-[29-[[2-(acetylamino)-2-deoxy-beta-D-galactopyra nosyl]oxy]-14,14-bis[[3-[[3-[[5-[[2-(acetylamino)-2-deoxy-b eta-D-galactopyranosyl]oxy]-1-oxopentyl]amino]propyl]amino] -3-oxopropoxy]methyl]-1,12,19,25-tetraoxo-16-oxa-13,20,24-t riazanonacos-1-yl]-4-hydroxy-2-pyrrolidinyl)methyl ester
gataaacaacaaagccaacgt

SEQ ID NO: 5759 - RNA, 21 nt, synthetic construct
  source 1..21: mol_type = other RNA
  modified_base 1: mod_base = OTHER; note = 2'-O-methylcytidine-3'-phosphorothioate
  modified_base 2: mod_base = OTHER; note = 2'-O-methyluridine-3'-phosphorothioate
  modified_base 3: mod_base = OTHER; note = 2'-O-methyladenosine-3'-phosphate
  modified_base 4: mod_base = OTHER; note = 2'-O-methylcytidine-3'-phosphate
  modified_base 5: mod_base = OTHER; note = 2'-O-methyluridine-3'-phosphate
  modified_base 6: mod_base = OTHER; note = 2'-O-methylguanosine-3'-phosphate
  modified_base 7: mod_base = OTHER; note = 2'-deoxy-2'-fluorouridine-3'-phosphate
  modified_base 8: mod_base = OTHER; note = 2'-O-methyladenosine-3'-phosphate
  modified_base 9: mod_base = OTHER; note = 2'-deoxy-2'-fluoroadenosine-3'-phosphate
  modified_base 10: mod_base = OTHER; note = 2'-deoxy-2'-fluorouridine-3'-phosphate
  modified_base 11: mod_base = OTHER; note = 2'-deoxy-2'-fluorocytidine-3'-phosphate
  modified_base 12: mod_base = OTHER; note = 2'-O-methylcytidine-3'-phosphate
  modified_base 13: mod_base = OTHER; note = 2'-O-methyladenosine-3'-phosphate
  modified_base 14: mod_base = OTHER; note = 2'-O-methylcytidine-3'-phosphate
  modified_base 15: mod_base = OTHER; note = 2'-O-methyladenosine-3'-phosphate
  modified_base 16: mod_base = OTHER; note = 2'-O-methyladenosine-3'-phosphate
  modified_base 17: mod_base = OTHER; note = 2'-O-methylcytidine-3'-phosphate
  modified_base 18: mod_base = OTHER; note = 2'-O-methylcytidine-3'-phosphate
  modified_base 19: mod_base = OTHER; note = 2'-O-methylcytidine-3'-phosphate
  modified_base 20: mod_base = OTHER; note = 2'-O-methyluridine-3'-phosphate
  modified_base 21: mod_base = OTHER; note = 2'-O-methyluridine-3'-phosphate ((2S,4R)-1-[29-[[2-(acetylamino)-2-deoxy-beta-D-galactopyra nosyl]oxy]-14,14-bis[[3-[[3-[[5-[[2-(acetylamino)-2-deoxy-b eta-D-galactopyranosyl]oxy]-1-oxopentyl]amino]propyl]amino] -3-oxopropoxy]methyl]-1,12,19,25-tetraoxo-16-oxa-13,20,24-t riazanonacos-1-yl]-4-hydroxy-2-pyrrolidinyl)methyl ester
ctactgtaatccacaaccctt

SEQ ID NO: 5760 - RNA, 21 nt, synthetic construct
  source 1..21: mol_type = other RNA
  modified_base 1: mod_base = OTHER; note = 2'-O-methyluridine-3'-phosphorothioate
  modified_base 2: mod_base = OTHER; note = 2'-O-methylguanosine-3'-phosphorothioate
  modified_base 3: mod_base = OTHER; note = 2'-O-methyladenosine-3'-phosphate
  modified_base 4: mod_base = OTHER; note = 2'-O-methyluridine-3'-phosphate
  modified_base 5: mod_base = OTHER; note = 2'-O-methylguanosine-3'-phosphate
  modified_base 6: mod_base = OTHER; note = 2'-O-methylguanosine-3'-phosphate
  modified_base 7: mod_base = OTHER; note = 2'-deoxy-2'-fluoroadenosine-3'-phosphate
  modified_base 8: mod_base = OTHER; note = 2'-O-methyladenosine-3'-phosphate
  modified_base 9: mod_base = OTHER; note = 2'-deoxy-2'-fluoroadenosine-3'-phosphate
  modified_base 10: mod_base = OTHER; note = 2'-deoxy-2'-fluorocytidine-3'-phosphate
  modified_base 11: mod_base = OTHER; note = 2'-deoxy-2'-fluoroadenosine-3'-phosphate
  modified_base 12: mod_base = OTHER; note = 2'-O-methyladenosine-3'-phosphate
  modified_base 13: mod_base = OTHER; note = 2'-O-methylguanosine-3'-phosphate
  modified_base 14: mod_base = OTHER; note = 2'-O-methylguanosine-3'-phosphate
  modified_base 15: mod_base = OTHER; note = 2'-O-methyladenosine-3'-phosphate
  modified_base 16: mod_base = OTHER; note = 2'-O-methylguanosine-3'-phosphate
  modified_base 17: mod_base = OTHER; note = 2'-O-methyluridine-3'-phosphate
  modified_base 18: mod_base = OTHER; note = 2'-O-methylcytidine-3'-phosphate
  modified_base 19: mod_base = OTHER; note = 2'-O-methyladenosine-3'-phosphate
  modified_base 20: mod_base = OTHER; note = 2'-O-methyladenosine-3'-phosphate
  modified_base 21: mod_base = OTHER; note = 2'-O-methyluridine-3'-phosphate ((2S,4R)-1-[29-[[2-(acetylamino)-2-deoxy-beta-D-galactopyra nosyl]oxy]-14,14-bis[[3-[[3-[[5-[[2-(acetylamino)-2-deoxy-b eta-D-galactopyranosyl]oxy]-1-oxopentyl]amino]propyl]amino] -3-oxopropoxy]methyl]-1,12,19,25-tetraoxo-16-oxa-13,20,24-t riazanonacos-1-yl]-4-hydroxy-2-pyrrolidinyl)methyl ester
tgatggaaacaaggagtcaat

SEQ ID NO: 5761 - RNA, 21 nt, synthetic construct
  source 1..21: mol_type = other RNA
  modified_base 1: mod_base = OTHER; note = 2'-O-methyladenosine-3'-phosphorothioate
  modified_base 2: mod_base = OTHER; note = 2'-O-methylguanosine-3'-phosphorothioate
  modified_base 3: mod_base = OTHER; note = 2'-O-methyladenosine-3'-phosphate
  modified_base 4: mod_base = OTHER; note = 2'-O-methylguanosine-3'-phosphate
  modified_base 5: mod_base = OTHER; note = 2'-O-methyluridine-3'-phosphate
  modified_base 6: mod_base = OTHER; note = 2'-O-methyluridine-3'-phosphate
  modified_base 7: mod_base = OTHER; note = 2'-deoxy-2'-fluorocytidine-3'-phosphate
  modified_base 8: mod_base = OTHER; note = 2'-O-methyladenosine-3'-phosphate
  modified_base 9: mod_base = OTHER; note = 2'-deoxy-2'-fluoroadenosine-3'-phosphate
  modified_base 10: mod_base = OTHER; note = 2'-deoxy-2'-fluoroadenosine-3'-phosphate
  modified_base 11: mod_base = OTHER; note = 2'-deoxy-2'-fluorouridine-3'-phosphate
  modified_base 12: mod_base = OTHER; note = 2'-O-methyladenosine-3'-phosphate
  modified_base 13: mod_base = OTHER; note = 2'-O-methylcytidine-3'-phosphate
  modified_base 14: mod_base = OTHER; note = 2'-O-methyladenosine-3'-phosphate
  modified_base 15: mod_base = OTHER; note = 2'-O-methyladenosine-3'-phosphate
  modified_base 16: mod_base = OTHER; note = 2'-O-methylcytidine-3'-phosphate
  modified_base 17: mod_base = OTHER; note = 2'-O-methyladenosine-3'-phosphate
  modified_base 18: mod_base = OTHER; note = 2'-O-methyladenosine-3'-phosphate
  modified_base 19: mod_base = OTHER; note = 2'-O-methyluridine-3'-phosphate
  modified_base 20: mod_base = OTHER; note = 2'-O-methyluridine-3'-phosphate
  modified_base 21: mod_base = OTHER; note = 2'-O-methyluridine-3'-phosphate ((2S,4R)-1-[29-[[2-(acetylamino)-2-deoxy-beta-D-galactopyra nosyl]oxy]-14,14-bis[[3-[[3-[[5-[[2-(acetylamino)-2-deoxy-b eta-D-galactopyranosyl]oxy]-1-oxopentyl]amino]propyl]amino] -3-oxopropoxy]methyl]-1,12,19,25-tetraoxo-16-oxa-13,20,24-t riazanonacos-1-yl]-4-hydroxy-2-pyrrolidinyl)methyl ester
agagttcaaatacaacaattt

SEQ ID NO: 5762 - RNA, 21 nt, synthetic construct
  source 1..21: mol_type = other RNA
  modified_base 1: mod_base = OTHER; note = 2'-O-methylguanosine-3'-phosphorothioate
  modified_base 2: mod_base = OTHER; note = 2'-O-methyladenosine-3'-phosphorothioate
  modified_base 3: mod_base = OTHER; note = 2'-O-methyladenosine-3'-phosphate
  modified_base 4: mod_base = OTHER; note = 2'-O-methylguanosine-3'-phosphate
  modified_base 5: mod_base = OTHER; note = 2'-O-methyladenosine-3'-phosphate
  modified_base 6: mod_base = OTHER; note = 2'-O-methyluridine-3'-phosphate
  modified_base 7: mod_base = OTHER; note = 2'-deoxy-2'-fluoroguanosine-3'-phosphate
  modified_base 8: mod_base = OTHER; note = 2'-O-methyluridine-3'-phosphate
  modified_base 9: mod_base = OTHER; note = 2'-deoxy-2'-fluoroguanosine-3'-phosphate
  modified_base 10: mod_base = OTHER; note = 2'-deoxy-2'-fluoroadenosine-3'-phosphate
  modified_base 11: mod_base = OTHER; note = 2'-deoxy-2'-fluoroadenosine-3'-phosphate
  modified_base 12: mod_base = OTHER; note = 2'-O-methyladenosine-3'-phosphate
  modified_base 13: mod_base = OTHER; note = 2'-O-methylguanosine-3'-phosphate
  modified_base 14: mod_base = OTHER; note = 2'-O-methylcytidine-3'-phosphate
  modified_base 15: mod_base = OTHER; note = 2'-O-methyladenosine-3'-phosphate
  modified_base 16: mod_base = OTHER; note = 2'-O-methylcytidine-3'-phosphate
  modified_base 17: mod_base = OTHER; note = 2'-O-methylguanosine-3'-phosphate
  modified_base 18: mod_base = OTHER; note = 2'-O-methyladenosine-3'-phosphate
  modified_base 19: mod_base = OTHER; note = 2'-O-methyladenosine-3'-phosphate
  modified_base 20: mod_base = OTHER; note = 2'-O-methyladenosine-3'-phosphate
  modified_base 21: mod_base = OTHER; note = 2'-O-methyluridine-3'-phosphate ((2S,4R)-1-[29-[[2-(acetylamino)-2-deoxy-beta-D-galactopyra nosyl]oxy]-14,14-bis[[3-[[3-[[5-[[2-(acetylamino)-2-deoxy-b eta-D-galactopyranosyl]oxy]-1-oxopentyl]amino]propyl]amino] -3-oxopropoxy]methyl]-1,12,19,25-tetraoxo-16-oxa-13,20,24-t riazanonacos-1-yl]-4-hydroxy-2-pyrrolidinyl)methyl ester
gaagatgtgaaagcacgaaat

SEQ ID NO: 5763 - RNA, 21 nt, synthetic construct
  source 1..21: mol_type = other RNA
  modified_base 1: mod_base = OTHER; note = 2'-O-methylcytidine-3'-phosphorothioate
  modified_base 2: mod_base = OTHER; note = 2'-O-methylguanosine-3'-phosphorothioate
  modified_base 3: mod_base = OTHER; note = 2'-O-methyladenosine-3'-phosphate
  modified_base 4: mod_base = OTHER; note = 2'-O-methyladenosine-3'-phosphate
  modified_base 5: mod_base = OTHER; note = 2'-O-methyladenosine-3'-phosphate
  modified_base 6: mod_base = OTHER; note = 2'-O-methylguanosine-3'-phosphate
  modified_base 7: mod_base = OTHER; note = 2'-deoxy-2'-fluorocytidine-3'-phosphate
  modified_base 8: mod_base = OTHER; note = 2'-O-methyladenosine-3'-phosphate
  modified_base 9: mod_base = OTHER; note = 2'-deoxy-2'-fluoroadenosine-3'-phosphate
  modified_base 10: mod_base = OTHER; note = 2'-deoxy-2'-fluoroguanosine-3'-phosphate
  modified_base 11: mod_base = OTHER; note = 2'-deoxy-2'-fluoroadenosine-3'-phosphate
  modified_base 12: mod_base = OTHER; note = 2'-O-methylguanosine-3'-phosphate
  modified_base 13: mod_base = OTHER; note = 2'-O-methyladenosine-3'-phosphate
  modified_base 14: mod_base = OTHER; note = 2'-O-methyluridine-3'-phosphate
  modified_base 15: mod_base = OTHER; note = 2'-O-methyluridine-3'-phosphate
  modified_base 16: mod_base = OTHER; note = 2'-O-methyladenosine-3'-phosphate
  modified_base 17: mod_base = OTHER; note = 2'-O-methyluridine-3'-phosphate
  modified_base 18: mod_base = OTHER; note = 2'-O-methylcytidine-3'-phosphate
  modified_base 19: mod_base = OTHER; note = 2'-O-methyladenosine-3'-phosphate
  modified_base 20: mod_base = OTHER; note = 2'-O-methyladenosine-3'-phosphate
  modified_base 21: mod_base = OTHER; note = 2'-O-methyluridine-3'-phosphate ((2S,4R)-1-[29-[[2-(acetylamino)-2-deoxy-beta-D-galactopyra nosyl]oxy]-14,14-bis[[3-[[3-[[5-[[2-(acetylamino)-2-deoxy-b eta-D-galactopyranosyl]oxy]-1-oxopentyl]amino]propyl]amino] -3-oxopropoxy]methyl]-1,12,19,25-tetraoxo-16-oxa-13,20,24-t riazanonacos-1-yl]-4-hydroxy-2-pyrrolidinyl)methyl ester
cgaaagcaagagattatcaat

SEQ ID NO: 5764 - RNA, 21 nt, synthetic construct
  source 1..21: mol_type = other RNA
  modified_base 1: mod_base = OTHER; note = 2'-O-methyladenosine-3'-phosphorothioate
  modified_base 2: mod_base = OTHER; note = 2'-O-methyladenosine-3'-phosphorothioate
  modified_base 3: mod_base = OTHER; note = 2'-O-methylguanosine-3'-phosphate
  modified_base 4: mod_base = OTHER; note = 2'-O-methyluridine-3'-phosphate
  modified_base 5: mod_base = OTHER; note = 2'-O-methylcytidine-3'-phosphate
  modified_base 6: mod_base = OTHER; note = 2'-O-methyladenosine-3'-phosphate
  modified_base 7: mod_base = OTHER; note = 2'-deoxy-2'-fluorocytidine-3'-phosphate
  modified_base 8: mod_base = OTHER; note = 2'-O-methyluridine-3'-phosphate
  modified_base 9: mod_base = OTHER; note = 2'-deoxy-2'-fluoroguanosine-3'-phosphate
  modified_base 10: mod_base = OTHER; note = 2'-deoxy-2'-fluoroadenosine-3'-phosphate
  modified_base 11: mod_base = OTHER; note = 2'-deoxy-2'-fluoroadenosine-3'-phosphate
  modified_base 12: mod_base = OTHER; note = 2'-O-methylcytidine-3'-phosphate
  modified_base 13: mod_base = OTHER; note = 2'-O-methyladenosine-3'-phosphate
  modified_base 14: mod_base = OTHER; note = 2'-O-methyladenosine-3'-phosphate
  modified_base 15: mod_base = OTHER; note = 2'-O-methylcytidine-3'-phosphate
  modified_base 16: mod_base = OTHER; note = 2'-O-methyluridine-3'-phosphate
  modified_base 17: mod_base = OTHER; note = 2'-O-methylguanosine-3'-phosphate
  modified_base 18: mod_base = OTHER; note = 2'-O-methyladenosine-3'-phosphate
  modified_base 19: mod_base = OTHER; note = 2'-O-methyluridine-3'-phosphate
  modified_base 20: mod_base = OTHER; note = 2'-O-methylcytidine-3'-phosphate
  modified_base 21: mod_base = OTHER; note = 2'-O-methyluridine-3'-phosphate ((2S,4R)-1-[29-[[2-(acetylamino)-2-deoxy-beta-D-galactopyra nosyl]oxy]-14,14-bis[[3-[[3-[[5-[[2-(acetylamino)-2-deoxy-b eta-D-galactopyranosyl]oxy]-1-oxopentyl]amino]propyl]amino] -3-oxopropoxy]methyl]-1,12,19,25-tetraoxo-16-oxa-13,20,24-t riazanonacos-1-yl]-4-hydroxy-2-pyrrolidinyl)methyl ester
aagtcactgaacaactgatct

SEQ ID NO: 5765 - RNA, 21 nt, synthetic construct
  source 1..21: mol_type = other RNA
  modified_base 1: mod_base = OTHER; note = 2'-O-methyluridine-3'-phosphorothioate
  modified_base 2: mod_base = OTHER; note = 2'-O-methylguanosine-3'-phosphorothioate
  modified_base 3: mod_base = OTHER; note = 2'-O-methyladenosine-3'-phosphate
  modified_base 4: mod_base = OTHER; note = 2'-O-methyluridine-3'-phosphate
  modified_base 5: mod_base = OTHER; note = 2'-O-methylcytidine-3'-phosphate
  modified_base 6: mod_base = OTHER; note = 2'-O-methylguanosine-3'-phosphate
  modified_base 7: mod_base = OTHER; note = 2'-deoxy-2'-fluoroadenosine-3'-phosphate
  modified_base 8: mod_base = OTHER; note = 2'-O-methyladenosine-3'-phosphate
  modified_base 9: mod_base = OTHER; note = 2'-deoxy-2'-fluoroguanosine-3'-phosphate
  modified_base 10: mod_base = OTHER; note = 2'-deoxy-2'-fluorocytidine-3'-phosphate
  modified_base 11: mod_base = OTHER; note = 2'-deoxy-2'-fluorouridine-3'-phosphate
  modified_base 12: mod_base = OTHER; note = 2'-O-methyladenosine-3'-phosphate
  modified_base 13: mod_base = OTHER; note = 2'-O-methyluridine-3'-phosphate
  modified_base 14: mod_base = OTHER; note = 2'-O-methylcytidine-3'-phosphate
  modified_base 15: mod_base = OTHER; note = 2'-O-methyladenosine-3'-phosphate
  modified_base 16: mod_base = OTHER; note = 2'-O-methyladenosine-3'-phosphate
  modified_base 17: mod_base = OTHER; note = 2'-O-methylcytidine-3'-phosphate
  modified_base 18: mod_base = OTHER; note = 2'-O-methyladenosine-3'-phosphate
  modified_base 19: mod_base = OTHER; note = 2'-O-methyladenosine-3'-phosphate
  modified_base 20: mod_base = OTHER; note = 2'-O-methyluridine-3'-phosphate
  modified_base 21: mod_base = OTHER; note = 2'-O-methyluridine-3'-phosphate ((2S,4R)-1-[29-[[2-(acetylamino)-2-deoxy-beta-D-galactopyra nosyl]oxy]-14,14-bis[[3-[[3-[[5-[[2-(acetylamino)-2-deoxy-b eta-D-galactopyranosyl]oxy]-1-oxopentyl]amino]propyl]amino] -3-oxopropoxy]methyl]-1,12,19,25-tetraoxo-16-oxa-13,20,24-t riazanonacos-1-yl]-4-hydroxy-2-pyrrolidinyl)methyl ester
tgatcgaagctatcaacaatt

SEQ ID NO: 5766 - RNA, 21 nt, synthetic construct
  source 1..21: mol_type = other RNA
  modified_base 1: mod_base = OTHER; note = 2'-O-methylguanosine-3'-phosphorothioate
  modified_base 2: mod_base = OTHER; note = 2'-O-methyladenosine-3'-phosphorothioate
  modified_base 3: mod_base = OTHER; note = 2'-O-methylcytidine-3'-phosphate
  modified_base 4: mod_base = OTHER; note = 2'-O-methyluridine-3'-phosphate
  modified_base 5: mod_base = OTHER; note = 2'-O-methyluridine-3'-phosphate
  modified_base 6: mod_base = OTHER; note = 2'-O-methyluridine-3'-phosphate
  modified_base 7: mod_base = OTHER; note = 2'-deoxy-2'-fluoroguanosine-3'-phosphate
  modified_base 8: mod_base = OTHER; note = 2'-O-methyladenosine-3'-phosphate
  modified_base 9: mod_base = OTHER; note = 2'-deoxy-2'-fluoroadenosine-3'-phosphate
  modified_base 10: mod_base = OTHER; note = 2'-deoxy-2'-fluoroguanosine-3'-phosphate
  modified_base 11: mod_base = OTHER; note = 2'-deoxy-2'-fluorocytidine-3'-phosphate
  modified_base 12: mod_base = OTHER; note = 2'-O-methylcytidine-3'-phosphate
  modified_base 13: mod_base = OTHER; note = 2'-O-methyluridine-3'-phosphate
  modified_base 14: mod_base = OTHER; note = 2'-O-methyladenosine-3'-phosphate
  modified_base 15: mod_base = OTHER; note = 2'-O-methylcytidine-3'-phosphate
  modified_base 16: mod_base = OTHER; note = 2'-O-methyladenosine-3'-phosphate
  modified_base 17: mod_base = OTHER; note = 2'-O-methylcytidine-3'-phosphate
  modified_base 18: mod_base = OTHER; note = 2'-O-methyladenosine-3'-phosphate
  modified_base 19: mod_base = OTHER; note = 2'-O-methyladenosine-3'-phosphate
  modified_base 20: mod_base = OTHER; note = 2'-O-methyladenosine-3'-phosphate
  modified_base 21: mod_base = OTHER; note = 2'-O-methyluridine-3'-phosphate ((2S,4R)-1-[29-[[2-(acetylamino)-2-deoxy-beta-D-galactopyra nosyl]oxy]-14,14-bis[[3-[[3-[[5-[[2-(acetylamino)-2-deoxy-b eta-D-galactopyranosyl]oxy]-1-oxopentyl]amino]propyl]amino] -3-oxopropoxy]methyl]-1,12,19,25-tetraoxo-16-oxa-13,20,24-t riazanonacos-1-yl]-4-hydroxy-2-pyrrolidinyl)methyl ester
gactttgaagcctacacaaat

SEQ ID NO: 5767 - RNA, 21 nt, synthetic construct
  source 1..21: mol_type = other RNA
  modified_base 1: mod_base = OTHER; note = 2'-O-methyluridine-3'-phosphorothioate
  modified_base 2: mod_base = OTHER; note = 2'-O-methyladenosine-3'-phosphorothioate
  modified_base 3: mod_base = OTHER; note = 2'-O-methylcytidine-3'-phosphate
  modified_base 4: mod_base = OTHER; note = 2'-O-methyluridine-3'-phosphate
  modified_base 5: mod_base = OTHER; note = 2'-O-methylguanosine-3'-phosphate
  modified_base 6: mod_base = OTHER; note = 2'-O-methylcytidine-3'-phosphate
  modified_base 7: mod_base = OTHER; note = 2'-deoxy-2'-fluorouridine-3'-phosphate
  modified_base 8: mod_base = OTHER; note = 2'-O-methyluridine-3'-phosphate
  modified_base 9: mod_base = OTHER; note = 2'-deoxy-2'-fluorouridine-3'-phosphate
  modified_base 10: mod_base = OTHER; note = 2'-deoxy-2'-fluorouridine-3'-phosphate
  modified_base 11: mod_base = OTHER; note = 2'-deoxy-2'-fluoroguanosine-3'-phosphate
  modified_base 12: mod_base = OTHER; note = 2'-O-methyladenosine-3'-phosphate
  modified_base 13: mod_base = OTHER; note = 2'-O-methyladenosine-3'-phosphate
  modified_base 14: mod_base = OTHER; note = 2'-O-methylcytidine-3'-phosphate
  modified_base 15: mod_base = OTHER; note = 2'-O-methylcytidine-3'-phosphate
  modified_base 16: mod_base = OTHER; note = 2'-O-methyluridine-3'-phosphate
  modified_base 17: mod_base = OTHER; note = 2'-O-methylguanosine-3'-phosphate
  modified_base 18: mod_base = OTHER; note = 2'-O-methyladenosine-3'-phosphate
  modified_base 19: mod_base = OTHER; note = 2'-O-methyladenosine-3'-phosphate
  modified_base 20: mod_base = OTHER; note = 2'-O-methylguanosine-3'-phosphate
  modified_base 21: mod_base = OTHER; note = 2'-O-methyluridine-3'-phosphate ((2S,4R)-1-[29-[[2-(acetylamino)-2-deoxy-beta-D-galactopyra nosyl]oxy]-14,14-bis[[3-[[3-[[5-[[2-(acetylamino)-2-deoxy-b eta-D-galactopyranosyl]oxy]-1-oxopentyl]amino]propyl]amino] -3-oxopropoxy]methyl]-1,12,19,25-tetraoxo-16-oxa-13,20,24-t riazanonacos-1-yl]-4-hydroxy-2-pyrrolidinyl)methyl ester
tactgcttttgaacctgaagt

SEQ ID NO: 5768 - RNA, 21 nt, synthetic construct
  source 1..21: mol_type = other RNA
  modified_base 1: mod_base = OTHER; note = 2'-O-methylguanosine-3'-phosphorothioate
  modified_base 2: mod_base = OTHER; note = 2'-O-methyladenosine-3'-phosphorothioate
  modified_base 3: mod_base = OTHER; note = 2'-O-methyladenosine-3'-phosphate
  modified_base 4: mod_base = OTHER; note = 2'-O-methylguanosine-3'-phosphate
  modified_base 5: mod_base = OTHER; note = 2'-O-methylcytidine-3'-phosphate
  modified_base 6: mod_base = OTHER; note = 2'-O-methyluridine-3'-phosphate
  modified_base 7: mod_base = OTHER; note = 2'-deoxy-2'-fluorouridine-3'-phosphate
  modified_base 8: mod_base = OTHER; note = 2'-O-methyluridine-3'-phosphate
  modified_base 9: mod_base = OTHER; note = 2'-deoxy-2'-fluoroguanosine-3'-phosphate
  modified_base 10: mod_base = OTHER; note = 2'-deoxy-2'-fluoroguanosine-3'-phosphate
  modified_base 11: mod_base = OTHER; note = 2'-deoxy-2'-fluoroguanosine-3'-phosphate
  modified_base 12: mod_base = OTHER; note = 2'-O-methyluridine-3'-phosphate
  modified_base 13: mod_base = OTHER; note = 2'-O-methyladenosine-3'-phosphate
  modified_base 14: mod_base = OTHER; note = 2'-O-methyladenosine-3'-phosphate
  modified_base 15: mod_base = OTHER; note = 2'-O-methyluridine-3'-phosphate
  modified_base 16: mod_base = OTHER; note = 2'-O-methyluridine-3'-phosphate
  modified_base 17: mod_base = OTHER; note = 2'-O-methyluridine-3'-phosphate
  modified_base 18: mod_base = OTHER; note = 2'-O-methyladenosine-3'-phosphate
  modified_base 19: mod_base = OTHER; note = 2'-O-methylguanosine-3'-phosphate
  modified_base 20: mod_base = OTHER; note = 2'-O-methyluridine-3'-phosphate
  modified_base 21: mod_base = OTHER; note = 2'-O-methyluridine-3'-phosphate ((2S,4R)-1-[29-[[2-(acetylamino)-2-deoxy-beta-D-galactopyra nosyl]oxy]-14,14-bis[[3-[[3-[[5-[[2-(acetylamino)-2-deoxy-b eta-D-galactopyranosyl]oxy]-1-oxopentyl]amino]propyl]amino] -3-oxopropoxy]methyl]-1,12,19,25-tetraoxo-16-oxa-13,20,24-t riazanonacos-1-yl]-4-hydroxy-2-pyrrolidinyl)methyl ester
gaagctttgggtaatttagtt

SEQ ID NO: 5769 - RNA, 21 nt, synthetic construct
  source 1..21: mol_type = other RNA
  modified_base 1: mod_base = OTHER; note = 2'-O-methylguanosine-3'-phosphorothioate
  modified_base 2: mod_base = OTHER; note = 2'-O-methyladenosine-3'-phosphorothioate
  modified_base 3: mod_base = OTHER; note = 2'-O-methyluridine-3'-phosphate
  modified_base 4: mod_base = OTHER; note = 2'-O-methylguanosine-3'-phosphate
  modified_base 5: mod_base = OTHER; note = 2'-O-methylguanosine-3'-phosphate
  modified_base 6: mod_base = OTHER; note = 2'-O-methyladenosine-3'-phosphate
  modified_base 7: mod_base = OTHER; note = 2'-deoxy-2'-fluorouridine-3'-phosphate
  modified_base 8: mod_base = OTHER; note = 2'-O-methyluridine-3'-phosphate
  modified_base 9: mod_base = OTHER; note = 2'-deoxy-2'-fluorouridine-3'-phosphate
  modified_base 10: mod_base = OTHER; note = 2'-deoxy-2'-fluorouridine-3'-phosphate
  modified_base 11: mod_base = OTHER; note = 2'-deoxy-2'-fluorocytidine-3'-phosphate
  modified_base 12: mod_base = OTHER; note = 2'-O-methyladenosine-3'-phosphate
  modified_base 13: mod_base = OTHER; note = 2'-O-methylcytidine-3'-phosphate
  modified_base 14: mod_base = OTHER; note = 2'-O-methylcytidine-3'-phosphate
  modified_base 15: mod_base = OTHER; note = 2'-O-methylguanosine-3'-phosphate
  modified_base 16: mod_base = OTHER; note = 2'-O-methyladenosine-3'-phosphate
  modified_base 17: mod_base = OTHER; note = 2'-O-methyluridine-3'-phosphate
  modified_base 18: mod_base = OTHER; note = 2'-O-methyluridine-3'-phosphate
  modified_base 19: mod_base = OTHER; note = 2'-O-methylcytidine-3'-phosphate
  modified_base 20: mod_base = OTHER; note = 2'-O-methyluridine-3'-phosphate
  modified_base 21: mod_base = OTHER; note = 2'-O-methyluridine-3'-phosphate ((2S,4R)-1-[29-[[2-(acetylamino)-2-deoxy-beta-D-galactopyra nosyl]oxy]-14,14-bis[[3-[[3-[[5-[[2-(acetylamino)-2-deoxy-b eta-D-galactopyranosyl]oxy]-1-oxopentyl]amino]propyl]amino] -3-oxopropoxy]methyl]-1,12,19,25-tetraoxo-16-oxa-13,20,24-t riazanonacos-1-yl]-4-hydroxy-2-pyrrolidinyl)methyl ester
gatggattttcaccgattctt

SEQ ID NO: 5770 - RNA, 21 nt, synthetic construct
  source 1..21: mol_type = other RNA
  modified_base 1: mod_base = OTHER; note = 2'-O-methyluridine-3'-phosphorothioate
  modified_base 2: mod_base = OTHER; note = 2'-O-methyluridine-3'-phosphorothioate
  modified_base 3: mod_base = OTHER; note = 2'-O-methylcytidine-3'-phosphate
  modified_base 4: mod_base = OTHER; note = 2'-O-methyluridine-3'-phosphate
  modified_base 5: mod_base = OTHER; note = 2'-O-methyladenosine-3'-phosphate
  modified_base 6: mod_base = OTHER; note = 2'-O-methylcytidine-3'-phosphate
  modified_base 7: mod_base = OTHER; note = 2'-deoxy-2'-fluorouridine-3'-phosphate
  modified_base 8: mod_base = OTHER; note = 2'-O-methyluridine-3'-phosphate
  modified_base 9: mod_base = OTHER; note = 2'-deoxy-2'-fluorouridine-3'-phosphate
  modified_base 10: mod_base = OTHER; note = 2'-deoxy-2'-fluoroguanosine-3'-phosphate
  modified_base 11: mod_base = OTHER; note = 2'-deoxy-2'-fluoroadenosine-3'-phosphate
  modified_base 12: mod_base = OTHER; note = 2'-O-methyladenosine-3'-phosphate
  modified_base 13: mod_base = OTHER; note = 2'-O-methyladenosine-3'-phosphate
  modified_base 14: mod_base = OTHER; note = 2'-O-methyladenosine-3'-phosphate
  modified_base 15: mod_base = OTHER; note = 2'-O-methyluridine-3'-phosphate
  modified_base 16: mod_base = OTHER; note = 2'-O-methylguanosine-3'-phosphate
  modified_base 17: mod_base = OTHER; note = 2'-O-methylcytidine-3'-phosphate
  modified_base 18: mod_base = OTHER; note = 2'-O-methyluridine-3'-phosphate
  modified_base 19: mod_base = OTHER; note = 2'-O-methyluridine-3'-phosphate
  modified_base 20: mod_base = OTHER; note = 2'-O-methyluridine-3'-phosphate
  modified_base 21: mod_base = OTHER; note = 2'-O-methyluridine-3'-phosphate ((2S,4R)-1-[29-[[2-(acetylamino)-2-deoxy-beta-D-galactopyra nosyl]oxy]-14,14-bis[[3-[[3-[[5-[[2-(acetylamino)-2-deoxy-b eta-D-galactopyranosyl]oxy]-1-oxopentyl]amino]propyl]amino] -3-oxopropoxy]methyl]-1,12,19,25-tetraoxo-16-oxa-13,20,24-t riazanonacos-1-yl]-4-hydroxy-2-pyrrolidinyl)methyl ester
ttctactttgaaaatgctttt

SEQ ID NO: 5771 - RNA, 21 nt, synthetic construct
  source 1..21: mol_type = other RNA
  modified_base 1: mod_base = OTHER; note = 2'-O-methyluridine-3'-phosphorothioate
  modified_base 2: mod_base = OTHER; note = 2'-O-methyluridine-3'-phosphorothioate
  modified_base 3: mod_base = OTHER; note = 2'-O-methyluridine-3'-phosphate
  modified_base 4: mod_base = OTHER; note = 2'-O-methylguanosine-3'-phosphate
  modified_base 5: mod_base = OTHER; note = 2'-O-methyluridine-3'-phosphate
  modified_base 6: mod_base = OTHER; note = 2'-O-methylcytidine-3'-phosphate
  modified_base 7: mod_base = OTHER; note = 2'-deoxy-2'-fluorocytidine-3'-phosphate
  modified_base 8: mod_base = OTHER; note = 2'-O-methyladenosine-3'-phosphate
  modified_base 9: mod_base = OTHER; note = 2'-deoxy-2'-fluoroadenosine-3'-phosphate
  modified_base 10: mod_base = OTHER; note = 2'-deoxy-2'-fluoroadenosine-3'-phosphate
  modified_base 11: mod_base = OTHER; note = 2'-deoxy-2'-fluoroadenosine-3'-phosphate
  modified_base 12: mod_base = OTHER; note = 2'-O-methylguanosine-3'-phosphate
  modified_base 13: mod_base = OTHER; note = 2'-O-methylcytidine-3'-phosphate
  modified_base 14: mod_base = OTHER; note = 2'-O-methyladenosine-3'-phosphate
  modified_base 15: mod_base = OTHER; note = 2'-O-methyladenosine-3'-phosphate
  modified_base 16: mod_base = OTHER; note = 2'-O-methyluridine-3'-phosphate
  modified_base 17: mod_base = OTHER; note = 2'-O-methyladenosine-3'-phosphate
  modified_base 18: mod_base = OTHER; note = 2'-O-methyladenosine-3'-phosphate
  modified_base 19: mod_base = OTHER; note = 2'-O-methyladenosine-3'-phosphate
  modified_base 20: mod_base = OTHER; note = 2'-O-methylcytidine-3'-phosphate
  modified_base 21: mod_base = OTHER; note = 2'-O-methyluridine-3'-phosphate ((2S,4R)-1-[29-[[2-(acetylamino)-2-deoxy-beta-D-galactopyra nosyl]oxy]-14,14-bis[[3-[[3-[[5-[[2-(acetylamino)-2-deoxy-b eta-D-galactopyranosyl]oxy]-1-oxopentyl]amino]propyl]amino] -3-oxopropoxy]methyl]-1,12,19,25-tetraoxo-16-oxa-13,20,24-t riazanonacos-1-yl]-4-hydroxy-2-pyrrolidinyl)methyl ester
tttgtccaaaagcaataaact

SEQ ID NO: 5772 - RNA, 21 nt, synthetic construct
  source 1..21: mol_type = other RNA
  modified_base 1: mod_base = OTHER; note = 2'-O-methyluridine-3'-phosphorothioate
  modified_base 2: mod_base = OTHER; note = 2'-O-methylcytidine-3'-phosphorothioate
  modified_base 3: mod_base = OTHER; note = 2'-O-methylcytidine-3'-phosphate
  modified_base 4: mod_base = OTHER; note = 2'-O-methyladenosine-3'-phosphate
  modified_base 5: mod_base = OTHER; note = 2'-O-methylcytidine-3'-phosphate
  modified_base 6: mod_base = OTHER; note = 2'-O-methyladenosine-3'-phosphate
  modified_base 7: mod_base = OTHER; note = 2'-deoxy-2'-fluorocytidine-3'-phosphate
  modified_base 8: mod_base = OTHER; note = 2'-O-methyluridine-3'-phosphate
  modified_base 9: mod_base = OTHER; note = 2'-deoxy-2'-fluoroadenosine-3'-phosphate
  modified_base 10: mod_base = OTHER; note = 2'-deoxy-2'-fluorouridine-3'-phosphate
  modified_base 11: mod_base = OTHER; note = 2'-deoxy-2'-fluorouridine-3'-phosphate
  modified_base 12: mod_base = OTHER; note = 2'-O-methyladenosine-3'-phosphate
  modified_base 13: mod_base = OTHER; note = 2'-O-methyluridine-3'-phosphate
  modified_base 14: mod_base = OTHER; note = 2'-O-methyluridine-3'-phosphate
  modified_base 15: mod_base = OTHER; note = 2'-O-methylcytidine-3'-phosphate
  modified_base 16: mod_base = OTHER; note = 2'-O-methyluridine-3'-phosphate
  modified_base 17: mod_base = OTHER; note = 2'-O-methyladenosine-3'-phosphate
  modified_base 18: mod_base = OTHER; note = 2'-O-methyladenosine-3'-phosphate
  modified_base 19: mod_base = OTHER; note = 2'-O-methyladenosine-3'-phosphate
  modified_base 20: mod_base = OTHER; note = 2'-O-methylcytidine-3'-phosphate
  modified_base 21: mod_base = OTHER; note = 2'-O-methyluridine-3'-phosphate ((2S,4R)-1-[29-[[2-(acetylamino)-2-deoxy-beta-D-galactopyra nosyl]oxy]-14,14-bis[[3-[[3-[[5-[[2-(acetylamino)-2-deoxy-b eta-D-galactopyranosyl]oxy]-1-oxopentyl]amino]propyl]amino] -3-oxopropoxy]methyl]-1,12,19,25-tetraoxo-16-oxa-13,20,24-t riazanonacos-1-yl]-4-hydroxy-2-pyrrolidinyl)methyl ester
tccacactattattctaaact

SEQ ID NO: 5773 - RNA, 21 nt, synthetic construct
  source 1..21: mol_type = other RNA
  modified_base 1: mod_base = OTHER; note = 2'-O-methyluridine-3'-phosphorothioate
  modified_base 2: mod_base = OTHER; note = 2'-O-methyladenosine-3'-phosphorothioate
  modified_base 3: mod_base = OTHER; note = 2'-O-methyladenosine-3'-phosphate
  modified_base 4: mod_base = OTHER; note = 2'-O-methyladenosine-3'-phosphate
  modified_base 5: mod_base = OTHER; note = 2'-O-methylcytidine-3'-phosphate
  modified_base 6: mod_base = OTHER; note = 2'-O-methylcytidine-3'-phosphate
  modified_base 7: mod_base = OTHER; note = 2'-deoxy-2'-fluorocytidine-3'-phosphate
  modified_base 8: mod_base = OTHER; note = 2'-O-methyluridine-3'-phosphate
  modified_base 9: mod_base = OTHER; note = 2'-deoxy-2'-fluorocytidine-3'-phosphate
  modified_base 10: mod_base = OTHER; note = 2'-deoxy-2'-fluoroadenosine-3'-phosphate
  modified_base 11: mod_base = OTHER; note = 2'-deoxy-2'-fluorouridine-3'-phosphate
  modified_base 12: mod_base = OTHER; note = 2'-O-methylguanosine-3'-phosphate
  modified_base 13: mod_base = OTHER; note = 2'-O-methyluridine-3'-phosphate
  modified_base 14: mod_base = OTHER; note = 2'-O-methyladenosine-3'-phosphate
  modified_base 15: mod_base = OTHER; note = 2'-O-methylcytidine-3'-phosphate
  modified_base 16: mod_base = OTHER; note = 2'-O-methyladenosine-3'-phosphate
  modified_base 17: mod_base = OTHER; note = 2'-O-methyluridine-3'-phosphate
  modified_base 18: mod_base = OTHER; note = 2'-O-methylcytidine-3'-phosphate
  modified_base 19: mod_base = OTHER; note = 2'-O-methyluridine-3'-phosphate
  modified_base 20: mod_base = OTHER; note = 2'-O-methylguanosine-3'-phosphate
  modified_base 21: mod_base = OTHER; note = 2'-O-methyluridine-3'-phosphate ((2S,4R)-1-[29-[[2-(acetylamino)-2-deoxy-beta-D-galactopyra nosyl]oxy]-14,14-bis[[3-[[3-[[5-[[2-(acetylamino)-2-deoxy-b eta-D-galactopyranosyl]oxy]-1-oxopentyl]amino]propyl]amino] -3-oxopropoxy]methyl]-1,12,19,25-tetraoxo-16-oxa-13,20,24-t riazanonacos-1-yl]-4-hydroxy-2-pyrrolidinyl)methyl ester
taaaccctcatgtacatctgt

SEQ ID NO: 5774 - RNA, 21 nt, synthetic construct
  source 1..21: mol_type = other RNA
  modified_base 1: mod_base = OTHER; note = 2'-O-methylcytidine-3'-phosphorothioate
  modified_base 2: mod_base = OTHER; note = 2'-O-methylguanosine-3'-phosphorothioate
  modified_base 3: mod_base = OTHER; note = 2'-O-methylcytidine-3'-phosphate
  modified_base 4: mod_base = OTHER; note = 2'-O-methylcytidine-3'-phosphate
  modified_base 5: mod_base = OTHER; note = 2'-O-methyluridine-3'-phosphate
  modified_base 6: mod_base = OTHER; note = 2'-O-methylguanosine-3'-phosphate
  modified_base 7: mod_base = OTHER; note = 2'-deoxy-2'-fluorocytidine-3'-phosphate
  modified_base 8: mod_base = OTHER; note = 2'-O-methyladenosine-3'-phosphate
  modified_base 9: mod_base = OTHER; note = 2'-deoxy-2'-fluorouridine-3'-phosphate
  modified_base 10: mod_base = OTHER; note = 2'-deoxy-2'-fluoroadenosine-3'-phosphate
  modified_base 11: mod_base = OTHER; note = 2'-deoxy-2'-fluoroguanosine-3'-phosphate
  modified_base 12: mod_base = OTHER; note = 2'-O-methylcytidine-3'-phosphate
  modified_base 13: mod_base = OTHER; note = 2'-O-methyladenosine-3'-phosphate
  modified_base 14: mod_base = OTHER; note = 2'-O-methyluridine-3'-phosphate
  modified_base 15: mod_base = OTHER; note = 2'-O-methyladenosine-3'-phosphate
  modified_base 16: mod_base = OTHER; note = 2'-O-methyluridine-3'-phosphate
  modified_base 17: mod_base = OTHER; note = 2'-O-methyladenosine-3'-phosphate
  modified_base 18: mod_base = OTHER; note = 2'-O-methyluridine-3'-phosphate
  modified_base 19: mod_base = OTHER; note = 2'-O-methyluridine-3'-phosphate
  modified_base 20: mod_base = OTHER; note = 2'-O-methyladenosine-3'-phosphate
  modified_base 21: mod_base = OTHER; note = 2'-O-methyluridine-3'-phosphate ((2S,4R)-1-[29-[[2-(acetylamino)-2-deoxy-beta-D-galactopyra nosyl]oxy]-14,14-bis[[3-[[3-[[5-[[2-(acetylamino)-2-deoxy-b eta-D-galactopyranosyl]oxy]-1-oxopentyl]amino]propyl]amino] -3-oxopropoxy]methyl]-1,12,19,25-tetraoxo-16-oxa-13,20,24-t riazanonacos-1-yl]-4-hydroxy-2-pyrrolidinyl)methyl ester
cgcctgcatagcatatattat

SEQ ID NO: 5775 - RNA, 21 nt, synthetic construct
  source 1..21: mol_type = other RNA
  modified_base 1: mod_base = OTHER; note = 2'-O-methylcytidine-3'-phosphorothioate
  modified_base 2: mod_base = OTHER; note = 2'-O-methyladenosine-3'-phosphorothioate
  modified_base 3: mod_base = OTHER; note = 2'-O-methylguanosine-3'-phosphate
  modified_base 4: mod_base = OTHER; note = 2'-O-methyluridine-3'-phosphate
  modified_base 5: mod_base = OTHER; note = 2'-O-methylcytidine-3'-phosphate
  modified_base 6: mod_base = OTHER; note = 2'-O-methyladenosine-3'-phosphate
  modified_base 7: mod_base = OTHER; note = 2'-deoxy-2'-fluoroguanosine-3'-phosphate
  modified_base 8: mod_base = OTHER; note = 2'-O-methyladenosine-3'-phosphate
  modified_base 9: mod_base = OTHER; note = 2'-deoxy-2'-fluoroadenosine-3'-phosphate
  modified_base 10: mod_base = OTHER; note = 2'-deoxy-2'-fluoroguanosine-3'-phosphate
  modified_base 11: mod_base = OTHER; note = 2'-deoxy-2'-fluoroadenosine-3'-phosphate
  modified_base 12: mod_base = OTHER; note = 2'-O-methylguanosine-3'-phosphate
  modified_base 13: mod_base = OTHER; note = 2'-O-methyladenosine-3'-phosphate
  modified_base 14: mod_base = OTHER; note = 2'-O-methylcytidine-3'-phosphate
  modified_base 15: mod_base = OTHER; note = 2'-O-methyluridine-3'-phosphate
  modified_base 16: mod_base = OTHER; note = 2'-O-methylcytidine-3'-phosphate
  modified_base 17: mod_base = OTHER; note = 2'-O-methylguanosine-3'-phosphate
  modified_base 18: mod_base = OTHER; note = 2'-O-methyluridine-3'-phosphate
  modified_base 19: mod_base = OTHER; note = 2'-O-methylguanosine-3'-phosphate
  modified_base 20: mod_base = OTHER; note = 2'-O-methyluridine-3'-phosphate
  modified_base 21: mod_base = OTHER; note = 2'-O-methyluridine-3'-phosphate ((2S,4R)-1-[29-[[2-(acetylamino)-2-deoxy-beta-D-galactopyra nosyl]oxy]-14,14-bis[[3-[[3-[[5-[[2-(acetylamino)-2-deoxy-b eta-D-galactopyranosyl]oxy]-1-oxopentyl]amino]propyl]amino] -3-oxopropoxy]methyl]-1,12,19,25-tetraoxo-16-oxa-13,20,24-t riazanonacos-1-yl]-4-hydroxy-2-pyrrolidinyl)methyl ester
cagtcagaagagactcgtgtt

SEQ ID NO: 5776 - RNA, 21 nt, synthetic construct
  source 1..21: mol_type = other RNA
  modified_base 1: mod_base = OTHER; note = 2'-O-methylguanosine-3'-phosphorothioate
  modified_base 2: mod_base = OTHER; note = 2'-O-methylguanosine-3'-phosphorothioate
  modified_base 3: mod_base = OTHER; note = 2'-O-methylcytidine-3'-phosphate
  modified_base 4: mod_base = OTHER; note = 2'-O-methyladenosine-3'-phosphate
  modified_base 5: mod_base = OTHER; note = 2'-O-methylguanosine-3'-phosphate
  modified_base 6: mod_base = OTHER; note = 2'-O-methyladenosine-3'-phosphate
  modified_base 7: mod_base = OTHER; note = 2'-deoxy-2'-fluoroadenosine-3'-phosphate
  modified_base 8: mod_base = OTHER; note = 2'-O-methyluridine-3'-phosphate
  modified_base 9: mod_base = OTHER; note = 2'-deoxy-2'-fluoroguanosine-3'-phosphate
  modified_base 10: mod_base = OTHER; note = 2'-deoxy-2'-fluorouridine-3'-phosphate
  modified_base 11: mod_base = OTHER; note = 2'-deoxy-2'-fluorouridine-3'-phosphate
  modified_base 12: mod_base = OTHER; note = 2'-O-methylcytidine-3'-phosphate
  modified_base 13: mod_base = OTHER; note = 2'-O-methyladenosine-3'-phosphate
  modified_base 14: mod_base = OTHER; note = 2'-O-methyluridine-3'-phosphate
  modified_base 15: mod_base = OTHER; note = 2'-O-methyluridine-3'-phosphate
  modified_base 16: mod_base = OTHER; note = 2'-O-methyluridine-3'-phosphate
  modified_base 17: mod_base = OTHER; note = 2'-O-methyluridine-3'-phosphate
  modified_base 18: mod_base = OTHER; note = 2'-O-methylcytidine-3'-phosphate
  modified_base 19: mod_base = OTHER; note = 2'-O-methyladenosine-3'-phosphate
  modified_base 20: mod_base = OTHER; note = 2'-O-methyluridine-3'-phosphate
  modified_base 21: mod_base = OTHER; note = 2'-O-methyluridine-3'-phosphate ((2S,4R)-1-[29-[[2-(acetylamino)-2-deoxy-beta-D-galactopyra nosyl]oxy]-14,14-bis[[3-[[3-[[5-[[2-(acetylamino)-2-deoxy-b eta-D-galactopyranosyl]oxy]-1-oxopentyl]amino]propyl]amino] -3-oxopropoxy]methyl]-1,12,19,25-tetraoxo-16-oxa-13,20,24-t riazanonacos-1-yl]-4-hydroxy-2-pyrrolidinyl)methyl ester
ggcagaatgttcattttcatt

SEQ ID NO: 5777 - RNA, 21 nt, synthetic construct
  source 1..21: mol_type = other RNA
  modified_base 1: mod_base = OTHER; note = 2'-O-methyladenosine-3'-phosphorothioate
  modified_base 2: mod_base = OTHER; note = 2'-O-methylcytidine-3'-phosphorothioate
  modified_base 3: mod_base = OTHER; note = 2'-O-methylcytidine-3'-phosphate
  modified_base 4: mod_base = OTHER; note = 2'-O-methyladenosine-3'-phosphate
  modified_base 5: mod_base = OTHER; note = 2'-O-methyladenosine-3'-phosphate
  modified_base 6: mod_base = OTHER; note = 2'-O-methylcytidine-3'-phosphate
  modified_base 7: mod_base = OTHER; note = 2'-deoxy-2'-fluoroadenosine-3'-phosphate
  modified_base 8: mod_base = OTHER; note = 2'-O-methylguanosine-3'-phosphate
  modified_base 9: mod_base = OTHER; note = 2'-deoxy-2'-fluorouridine-3'-phosphate
  modified_base 10: mod_base = OTHER; note = 2'-deoxy-2'-fluoroadenosine-3'-phosphate
  modified_base 11: mod_base = OTHER; note = 2'-deoxy-2'-fluorocytidine-3'-phosphate
  modified_base 12: mod_base = OTHER; note = 2'-O-methylcytidine-3'-phosphate
  modified_base 13: mod_base = OTHER; note = 2'-O-methylcytidine-3'-phosphate
  modified_base 14: mod_base = OTHER; note = 2'-O-methyladenosine-3'-phosphate
  modified_base 15: mod_base = OTHER; note = 2'-O-methyluridine-3'-phosphate
  modified_base 16: mod_base = OTHER; note = 2'-O-methylcytidine-3'-phosphate
  modified_base 17: mod_base = OTHER; note = 2'-O-methyladenosine-3'-phosphate
  modified_base 18: mod_base = OTHER; note = 2'-O-methyladenosine-3'-phosphate
  modified_base 19: mod_base = OTHER; note = 2'-O-methylguanosine-3'-phosphate
  modified_base 20: mod_base = OTHER; note = 2'-O-methylcytidine-3'-phosphate
  modified_base 21: mod_base = OTHER; note = 2'-O-methyluridine-3'-phosphate ((2S,4R)-1-[29-[[2-(acetylamino)-2-deoxy-beta-D-galactopyra nosyl]oxy]-14,14-bis[[3-[[3-[[5-[[2-(acetylamino)-2-deoxy-b eta-D-galactopyranosyl]oxy]-1-oxopentyl]amino]propyl]amino] -3-oxopropoxy]methyl]-1,12,19,25-tetraoxo-16-oxa-13,20,24-t riazanonacos-1-yl]-4-hydroxy-2-pyrrolidinyl)methyl ester
accaacagtacccatcaagct

SEQ ID NO: 5778 - RNA, 21 nt, synthetic construct
  source 1..21: mol_type = other RNA
  modified_base 1: mod_base = OTHER; note = 2'-O-methyladenosine-3'-phosphorothioate
  modified_base 2: mod_base = OTHER; note = 2'-O-methyladenosine-3'-phosphorothioate
  modified_base 3: mod_base = OTHER; note = 2'-O-methyluridine-3'-phosphate
  modified_base 4: mod_base = OTHER; note = 2'-O-methylguanosine-3'-phosphate
  modified_base 5: mod_base = OTHER; note = 2'-O-methylguanosine-3'-phosphate
  modified_base 6: mod_base = OTHER; note = 2'-O-methylguanosine-3'-phosphate
  modified_base 7: mod_base = OTHER; note = 2'-deoxy-2'-fluoroadenosine-3'-phosphate
  modified_base 8: mod_base = OTHER; note = 2'-O-methyladenosine-3'-phosphate
  modified_base 9: mod_base = OTHER; note = 2'-deoxy-2'-fluoroadenosine-3'-phosphate
  modified_base 10: mod_base = OTHER; note = 2'-deoxy-2'-fluoroguanosine-3'-phosphate
  modified_base 11: mod_base = OTHER; note = 2'-deoxy-2'-fluoroadenosine-3'-phosphate
  modified_base 12: mod_base = OTHER; note = 2'-O-methyladenosine-3'-phosphate
  modified_base 13: mod_base = OTHER; note = 2'-O-methyladenosine-3'-phosphate
  modified_base 14: mod_base = OTHER; note = 2'-O-methyladenosine-3'-phosphate
  modified_base 15: mod_base = OTHER; note = 2'-O-methylcytidine-3'-phosphate
  modified_base 16: mod_base = OTHER; note = 2'-O-methyluridine-3'-phosphate
  modified_base 17: mod_base = OTHER; note = 2'-O-methyluridine-3'-phosphate
  modified_base 18: mod_base = OTHER; note = 2'-O-methylcytidine-3'-phosphate
  modified_base 19: mod_base = OTHER; note = 2'-O-methyluridine-3'-phosphate
  modified_base 20: mod_base = OTHER; note = 2'-O-methylcytidine-3'-phosphate
  modified_base 21: mod_base = OTHER; note = 2'-O-methyluridine-3'-phosphate ((2S,4R)-1-[29-[[2-(acetylamino)-2-deoxy-beta-D-galactopyra nosyl]oxy]-14,14-bis[[3-[[3-[[5-[[2-(acetylamino)-2-deoxy-b eta-D-galactopyranosyl]oxy]-1-oxopentyl]amino]propyl]amino] -3-oxopropoxy]methyl]-1,12,19,25-tetraoxo-16-oxa-13,20,24-t riazanonacos-1-yl]-4-hydroxy-2-pyrrolidinyl)methyl ester
aatgggaaagaaaacttctct

SEQ ID NO: 5779 - RNA, 21 nt, synthetic construct
  source 1..21: mol_type = other RNA
  modified_base 1: mod_base = OTHER; note = 2'-O-methylcytidine-3'-phosphorothioate
  modified_base 2: mod_base = OTHER; note = 2'-O-methylcytidine-3'-phosphorothioate
  modified_base 3: mod_base = OTHER; note = 2'-O-methyluridine-3'-phosphate
  modified_base 4: mod_base = OTHER; note = 2'-O-methylcytidine-3'-phosphate
  modified_base 5: mod_base = OTHER; note = 2'-O-methyluridine-3'-phosphate
  modified_base 6: mod_base = OTHER; note = 2'-O-methyluridine-3'-phosphate
  modified_base 7: mod_base = OTHER; note = 2'-deoxy-2'-fluorouridine-3'-phosphate
  modified_base 8: mod_base = OTHER; note = 2'-O-methylguanosine-3'-phosphate
  modified_base 9: mod_base = OTHER; note = 2'-deoxy-2'-fluorouridine-3'-phosphate
  modified_base 10: mod_base = OTHER; note = 2'-deoxy-2'-fluoroguanosine-3'-phosphate
  modified_base 11: mod_base = OTHER; note = 2'-deoxy-2'-fluoroguanosine-3'-phosphate
  modified_base 12: mod_base = OTHER; note = 2'-O-methylcytidine-3'-phosphate
  modified_base 13: mod_base = OTHER; note = 2'-O-methyladenosine-3'-phosphate
  modified_base 14: mod_base = OTHER; note = 2'-O-methyladenosine-3'-phosphate
  modified_base 15: mod_base = OTHER; note = 2'-O-methyladenosine-3'-phosphate
  modified_base 16: mod_base = OTHER; note = 2'-O-methyladenosine-3'-phosphate
  modified_base 17: mod_base = OTHER; note = 2'-O-methylcytidine-3'-phosphate
  modified_base 18: mod_base = OTHER; note = 2'-O-methyladenosine-3'-phosphate
  modified_base 19: mod_base = OTHER; note = 2'-O-methyluridine-3'-phosphate
  modified_base 20: mod_base = OTHER; note = 2'-O-methylcytidine-3'-phosphate
  modified_base 21: mod_base = OTHER; note = 2'-O-methyluridine-3'-phosphate ((2S,4R)-1-[29-[[2-(acetylamino)-2-deoxy-beta-D-galactopyra nosyl]oxy]-14,14-bis[[3-[[3-[[5-[[2-(acetylamino)-2-deoxy-b eta-D-galactopyranosyl]oxy]-1-oxopentyl]amino]propyl]amino] -3-oxopropoxy]methyl]-1,12,19,25-tetraoxo-16-oxa-13,20,24-t riazanonacos-1-yl]-4-hydroxy-2-pyrrolidinyl)methyl ester
cctctttgtggcaaaacatct

SEQ ID NO: 5780 - RNA, 21 nt, synthetic construct
  source 1..21: mol_type = other RNA
  modified_base 1: mod_base = OTHER; note = 2'-O-methyluridine-3'-phosphorothioate
  modified_base 2: mod_base = OTHER; note = 2'-O-methylcytidine-3'-phosphorothioate
  modified_base 3: mod_base = OTHER; note = 2'-O-methyluridine-3'-phosphate
  modified_base 4: mod_base = OTHER; note = 2'-O-methyladenosine-3'-phosphate
  modified_base 5: mod_base = OTHER; note = 2'-O-methyladenosine-3'-phosphate
  modified_base 6: mod_base = OTHER; note = 2'-O-methylguanosine-3'-phosphate
  modified_base 7: mod_base = OTHER; note = 2'-deoxy-2'-fluoroguanosine-3'-phosphate
  modified_base 8: mod_base = OTHER; note = 2'-O-methylcytidine-3'-phosphate
  modified_base 9: mod_base = OTHER; note = 2'-deoxy-2'-fluorocytidine-3'-phosphate
  modified_base 10: mod_base = OTHER; note = 2'-deoxy-2'-fluorouridine-3'-phosphate
  modified_base 11: mod_base = OTHER; note = 2'-deoxy-2'-fluoroguanosine-3'-phosphate
  modified_base 12: mod_base = OTHER; note = 2'-O-methyladenosine-3'-phosphate
  modified_base 13: mod_base = OTHER; note = 2'-O-methyladenosine-3'-phosphate
  modified_base 14: mod_base = OTHER; note = 2'-O-methyladenosine-3'-phosphate
  modified_base 15: mod_base = OTHER; note = 2'-O-methyladenosine-3'-phosphate
  modified_base 16: mod_base = OTHER; note = 2'-O-methylcytidine-3'-phosphate
  modified_base 17: mod_base = OTHER; note = 2'-O-methylcytidine-3'-phosphate
  modified_base 18: mod_base = OTHER; note = 2'-O-methyladenosine-3'-phosphate
  modified_base 19: mod_base = OTHER; note = 2'-O-methyluridine-3'-phosphate
  modified_base 20: mod_base = OTHER; note = 2'-O-methyluridine-3'-phosphate
  modified_base 21: mod_base = OTHER; note = 2'-O-methyluridine-3'-phosphate ((2S,4R)-1-[29-[[2-(acetylamino)-2-deoxy-beta-D-galactopyra nosyl]oxy]-14,14-bis[[3-[[3-[[5-[[2-(acetylamino)-2-deoxy-b eta-D-galactopyranosyl]oxy]-1-oxopentyl]amino]propyl]amino] -3-oxopropoxy]methyl]-1,12,19,25-tetraoxo-16-oxa-13,20,24-t riazanonacos-1-yl]-4-hydroxy-2-pyrrolidinyl)methyl ester
tctaaggcctgaaaaccattt

SEQ ID NO: 5781 - RNA, 21 nt, synthetic construct
  source 1..21: mol_type = other RNA
  modified_base 1: mod_base = OTHER; note = 2'-O-methylguanosine-3'-phosphorothioate
  modified_base 2: mod_base = OTHER; note = 2'-O-methylguanosine-3'-phosphorothioate
  modified_base 3: mod_base = OTHER; note = 2'-O-methyluridine-3'-phosphate
  modified_base 4: mod_base = OTHER; note = 2'-O-methylcytidine-3'-phosphate
  modified_base 5: mod_base = OTHER; note = 2'-O-methyluridine-3'-phosphate
  modified_base 6: mod_base = OTHER; note = 2'-O-methyluridine-3'-phosphate
  modified_base 7: mod_base = OTHER; note = 2'-deoxy-2'-fluorocytidine-3'-phosphate
  modified_base 8: mod_base = OTHER; note = 2'-O-methyluridine-3'-phosphate
  modified_base 9: mod_base = OTHER; note = 2'-deoxy-2'-fluoroadenosine-3'-phosphate
  modified_base 10: mod_base = OTHER; note = 2'-deoxy-2'-fluoroadenosine-3'-phosphate
  modified_base 11: mod_base = OTHER; note = 2'-deoxy-2'-fluoroadenosine-3'-phosphate
  modified_base 12: mod_base = OTHER; note = 2'-O-methyluridine-3'-phosphate
  modified_base 13: mod_base = OTHER; note = 2'-O-methyluridine-3'-phosphate
  modified_base 14: mod_base = OTHER; note = 2'-O-methyluridine-3'-phosphate
  modified_base 15: mod_base = OTHER; note = 2'-O-methylcytidine-3'-phosphate
  modified_base 16: mod_base = OTHER; note = 2'-O-methyladenosine-3'-phosphate
  modified_base 17: mod_base = OTHER; note = 2'-O-methyladenosine-3'-phosphate
  modified_base 18: mod_base = OTHER; note = 2'-O-methylcytidine-3'-phosphate
  modified_base 19: mod_base = OTHER; note = 2'-O-methyladenosine-3'-phosphate
  modified_base 20: mod_base = OTHER; note = 2'-O-methylguanosine-3'-phosphate
  modified_base 21: mod_base = OTHER; note = 2'-O-methyluridine-3'-phosphate ((2S,4R)-1-[29-[[2-(acetylamino)-2-deoxy-beta-D-galactopyra nosyl]oxy]-14,14-bis[[3-[[3-[[5-[[2-(acetylamino)-2-deoxy-b eta-D-galactopyranosyl]oxy]-1-oxopentyl]amino]propyl]amino] -3-oxopropoxy]methyl]-1,12,19,25-tetraoxo-16-oxa-13,20,24-t riazanonacos-1-yl]-4-hydroxy-2-pyrrolidinyl)methyl ester
ggtcttctaaatttcaacagt

SEQ ID NO: 5782 - RNA, 21 nt, synthetic construct
  source 1..21: mol_type = other RNA
  modified_base 1: mod_base = OTHER; note = 2'-O-methylcytidine-3'-phosphorothioate
  modified_base 2: mod_base = OTHER; note = 2'-O-methyladenosine-3'-phosphorothioate
  modified_base 3: mod_base = OTHER; note = 2'-O-methylcytidine-3'-phosphate
  modified_base 4: mod_base = OTHER; note = 2'-O-methyluridine-3'-phosphate
  modified_base 5: mod_base = OTHER; note = 2'-O-methyluridine-3'-phosphate
  modified_base 6: mod_base = OTHER; note = 2'-O-methylcytidine-3'-phosphate
  modified_base 7: mod_base = OTHER; note = 2'-deoxy-2'-fluorouridine-3'-phosphate
  modified_base 8: mod_base = OTHER; note = 2'-O-methylguanosine-3'-phosphate
  modified_base 9: mod_base = OTHER; note = 2'-deoxy-2'-fluorocytidine-3'-phosphate
  modified_base 10: mod_base = OTHER; note = 2'-deoxy-2'-fluoroadenosine-3'-phosphate
  modified_base 11: mod_base = OTHER; note = 2'-deoxy-2'-fluorouridine-3'-phosphate
  modified_base 12: mod_base = OTHER; note = 2'-O-methyluridine-3'-phosphate
  modified_base 13: mod_base = OTHER; note = 2'-O-methylcytidine-3'-phosphate
  modified_base 14: mod_base = OTHER; note = 2'-O-methyluridine-3'-phosphate
  modified_base 15: mod_base = OTHER; note = 2'-O-methylcytidine-3'-phosphate
  modified_base 16: mod_base = OTHER; note = 2'-O-methyluridine-3'-phosphate
  modified_base 17: mod_base = OTHER; note = 2'-O-methylguanosine-3'-phosphate
  modified_base 18: mod_base = OTHER; note = 2'-O-methyluridine-3'-phosphate
  modified_base 19: mod_base = OTHER; note = 2'-O-methyluridine-3'-phosphate
  modified_base 20: mod_base = OTHER; note = 2'-O-methylcytidine-3'-phosphate
  modified_base 21: mod_base = OTHER; note = 2'-O-methyluridine-3'-phosphate ((2S,4R)-1-[29-[[2-(acetylamino)-2-deoxy-beta-D-galactopyra nosyl]oxy]-14,14-bis[[3-[[3-[[5-[[2-(acetylamino)-2-deoxy-b eta-D-galactopyranosyl]oxy]-1-oxopentyl]amino]propyl]amino] -3-oxopropoxy]methyl]-1,12,19,25-tetraoxo-16-oxa-13,20,24-t riazanonacos-1-yl]-4-hydroxy-2-pyrrolidinyl)methyl ester
cacttctgcattctctgttct

SEQ ID NO: 5783 - RNA, 21 nt, synthetic construct
  source 1..21: mol_type = other RNA
  modified_base 1: mod_base = OTHER; note = 2'-O-methylcytidine-3'-phosphorothioate
  modified_base 2: mod_base = OTHER; note = 2'-O-methylcytidine-3'-phosphorothioate
  modified_base 3: mod_base = OTHER; note = 2'-O-methyluridine-3'-phosphate
  modified_base 4: mod_base = OTHER; note = 2'-O-methylcytidine-3'-phosphate
  modified_base 5: mod_base = OTHER; note = 2'-O-methyluridine-3'-phosphate
  modified_base 6: mod_base = OTHER; note = 2'-O-methyluridine-3'-phosphate
  modified_base 7: mod_base = OTHER; note = 2'-deoxy-2'-fluorocytidine-3'-phosphate
  modified_base 8: mod_base = OTHER; note = 2'-O-methyladenosine-3'-phosphate
  modified_base 9: mod_base = OTHER; note = 2'-deoxy-2'-fluorouridine-3'-phosphate
  modified_base 10: mod_base = OTHER; note = 2'-deoxy-2'-fluoroguanosine-3'-phosphate
  modified_base 11: mod_base = OTHER; note = 2'-deoxy-2'-fluorocytidine-3'-phosphate
  modified_base 12: mod_base = OTHER; note = 2'-O-methyladenosine-3'-phosphate
  modified_base 13: mod_base = OTHER; note = 2'-O-methyluridine-3'-phosphate
  modified_base 14: mod_base = OTHER; note = 2'-O-methylguanosine-3'-phosphate
  modified_base 15: mod_base = OTHER; note = 2'-O-methyluridine-3'-phosphate
  modified_base 16: mod_base = OTHER; note = 2'-O-methyluridine-3'-phosphate
  modified_base 17: mod_base = OTHER; note = 2'-O-methyluridine-3'-phosphate
  modified_base 18: mod_base = OTHER; note = 2'-O-methylcytidine-3'-phosphate
  modified_base 19: mod_base = OTHER; note = 2'-O-methyluridine-3'-phosphate
  modified_base 20: mod_base = OTHER; note = 2'-O-methylguanosine-3'-phosphate
  modified_base 21: mod_base = OTHER; note = 2'-O-methyluridine-3'-phosphate ((2S,4R)-1-[29-[[2-(acetylamino)-2-deoxy-beta-D-galactopyra nosyl]oxy]-14,14-bis[[3-[[3-[[5-[[2-(acetylamino)-2-deoxy-b eta-D-galactopyranosyl]oxy]-1-oxopentyl]amino]propyl]amino] -3-oxopropoxy]methyl]-1,12,19,25-tetraoxo-16-oxa-13,20,24-t riazanonacos-1-yl]-4-hydroxy-2-pyrrolidinyl)methyl ester
cctcttcatgcatgtttctgt

SEQ ID NO: 5784 - RNA, 21 nt, synthetic construct
  source 1..21: mol_type = other RNA
  modified_base 1: mod_base = OTHER; note = 2'-O-methylcytidine-3'-phosphorothioate
  modified_base 2: mod_base = OTHER; note = 2'-O-methylcytidine-3'-phosphorothioate
  modified_base 3: mod_base = OTHER; note = 2'-O-methyluridine-3'-phosphate
  modified_base 4: mod_base = OTHER; note = 2'-O-methyladenosine-3'-phosphate
  modified_base 5: mod_base = OTHER; note = 2'-O-methylcytidine-3'-phosphate
  modified_base 6: mod_base = OTHER; note = 2'-O-methyladenosine-3'-phosphate
  modified_base 7: mod_base = OTHER; note = 2'-deoxy-2'-fluorouridine-3'-phosphate
  modified_base 8: mod_base = OTHER; note = 2'-O-methylguanosine-3'-phosphate
  modified_base 9: mod_base = OTHER; note = 2'-deoxy-2'-fluorouridine-3'-phosphate
  modified_base 10: mod_base = OTHER; note = 2'-deoxy-2'-fluoroadenosine-3'-phosphate
  modified_base 11: mod_base = OTHER; note = 2'-deoxy-2'-fluoroadenosine-3'-phosphate
  modified_base 12: mod_base = OTHER; note = 2'-O-methyluridine-3'-phosphate
  modified_base 13: mod_base = OTHER; note = 2'-O-methylguanosine-3'-phosphate
  modified_base 14: mod_base = OTHER; note = 2'-O-methylcytidine-3'-phosphate
  modified_base 15: mod_base = OTHER; note = 2'-O-methyladenosine-3'-phosphate
  modified_base 16: mod_base = OTHER; note = 2'-O-methyluridine-3'-phosphate
  modified_base 17: mod_base = OTHER; note = 2'-O-methyladenosine-3'-phosphate
  modified_base 18: mod_base = OTHER; note = 2'-O-methyluridine-3'-phosphate
  modified_base 19: mod_base = OTHER; note = 2'-O-methylguanosine-3'-phosphate
  modified_base 20: mod_base = OTHER; note = 2'-O-methyluridine-3'-phosphate
  modified_base 21: mod_base = OTHER; note = 2'-O-methyluridine-3'-phosphate ((2S,4R)-1-[29-[[2-(acetylamino)-2-deoxy-beta-D-galactopyra nosyl]oxy]-14,14-bis[[3-[[3-[[5-[[2-(acetylamino)-2-deoxy-b eta-D-galactopyranosyl]oxy]-1-oxopentyl]amino]propyl]amino] -3-oxopropoxy]methyl]-1,12,19,25-tetraoxo-16-oxa-13,20,24-t riazanonacos-1-yl]-4-hydroxy-2-pyrrolidinyl)methyl ester
cctacatgtaatgcatatgtt

SEQ ID NO: 5785 - RNA, 21 nt, synthetic construct
  source 1..21: mol_type = other RNA
  modified_base 1: mod_base = OTHER; note = 2'-O-methyladenosine-3'-phosphorothioate
  modified_base 2: mod_base = OTHER; note = 2'-O-methyluridine-3'-phosphorothioate
  modified_base 3: mod_base = OTHER; note = 2'-O-methylguanosine-3'-phosphate
  modified_base 4: mod_base = OTHER; note = 2'-O-methyluridine-3'-phosphate
  modified_base 5: mod_base = OTHER; note = 2'-O-methylguanosine-3'-phosphate
  modified_base 6: mod_base = OTHER; note = 2'-O-methyladenosine-3'-phosphate
  modified_base 7: mod_base = OTHER; note = 2'-deoxy-2'-fluorouridine-3'-phosphate
  modified_base 8: mod_base = OTHER; note = 2'-O-methylguanosine-3'-phosphate
  modified_base 9: mod_base = OTHER; note = 2'-deoxy-2'-fluorocytidine-3'-phosphate
  modified_base 10: mod_base = OTHER; note = 2'-deoxy-2'-fluoroadenosine-3'-phosphate
  modified_base 11: mod_base = OTHER; note = 2'-deoxy-2'-fluorouridine-3'-phosphate
  modified_base 12: mod_base = OTHER; note = 2'-O-methylcytidine-3'-phosphate
  modified_base 13: mod_base = OTHER; note = 2'-O-methyladenosine-3'-phosphate
  modified_base 14: mod_base = OTHER; note = 2'-O-methyluridine-3'-phosphate
  modified_base 15: mod_base = OTHER; note = 2'-O-methylcytidine-3'-phosphate
  modified_base 16: mod_base = OTHER; note = 2'-O-methyluridine-3'-phosphate
  modified_base 17: mod_base = OTHER; note = 2'-O-methyluridine-3'-phosphate
  modified_base 18: mod_base = OTHER; note = 2'-O-methyladenosine-3'-phosphate
  modified_base 19: mod_base = OTHER; note = 2'-O-methyluridine-3'-phosphate
  modified_base 20: mod_base = OTHER; note = 2'-O-methylcytidine-3'-phosphate
  modified_base 21: mod_base = OTHER; note = 2'-O-methyluridine-3'-phosphate ((2S,4R)-1-[29-[[2-(acetylamino)-2-deoxy-beta-D-galactopyra nosyl]oxy]-14,14-bis[[3-[[3-[[5-[[2-(acetylamino)-2-deoxy-b eta-D-galactopyranosyl]oxy]-1-oxopentyl]amino]propyl]amino] -3-oxopropoxy]methyl]-1,12,19,25-tetraoxo-16-oxa-13,20,24-t riazanonacos-1-yl]-4-hydroxy-2-pyrrolidinyl)methyl ester
atgtgatgcatcatcttatct

SEQ ID NO: 5786 - RNA, 21 nt, synthetic construct
  source 1..21: mol_type = other RNA
  modified_base 1: mod_base = OTHER; note = 2'-O-methyluridine-3'-phosphorothioate
  modified_base 2: mod_base = OTHER; note = 2'-O-methyladenosine-3'-phosphorothioate
  modified_base 3: mod_base = OTHER; note = 2'-O-methyluridine-3'-phosphate
  modified_base 4: mod_base = OTHER; note = 2'-O-methylcytidine-3'-phosphate
  modified_base 5: mod_base = OTHER; note = 2'-O-methyladenosine-3'-phosphate
  modified_base 6: mod_base = OTHER; note = 2'-O-methyluridine-3'-phosphate
  modified_base 7: mod_base = OTHER; note = 2'-deoxy-2'-fluoroadenosine-3'-phosphate
  modified_base 8: mod_base = OTHER; note = 2'-O-methyluridine-3'-phosphate
  modified_base 9: mod_base = OTHER; note = 2'-deoxy-2'-fluoroadenosine-3'-phosphate
  modified_base 10: mod_base = OTHER; note = 2'-deoxy-2'-fluorouridine-3'-phosphate
  modified_base 11: mod_base = OTHER; note = 2'-deoxy-2'-fluorouridine-3'-phosphate
  modified_base 12: mod_base = OTHER; note = 2'-O-methylcytidine-3'-phosphate
  modified_base 13: mod_base = OTHER; note = 2'-O-methylcytidine-3'-phosphate
  modified_base 14: mod_base = OTHER; note = 2'-O-methyluridine-3'-phosphate
  modified_base 15: mod_base = OTHER; note = 2'-O-methyluridine-3'-phosphate
  modified_base 16: mod_base = OTHER; note = 2'-O-methylcytidine-3'-phosphate
  modified_base 17: mod_base = OTHER; note = 2'-O-methylcytidine-3'-phosphate
  modified_base 18: mod_base = OTHER; note = 2'-O-methyluridine-3'-phosphate
  modified_base 19: mod_base = OTHER; note = 2'-O-methyladenosine-3'-phosphate
  modified_base 20: mod_base = OTHER; note = 2'-O-methyluridine-3'-phosphate
  modified_base 21: mod_base = OTHER; note = 2'-O-methyluridine-3'-phosphate ((2S,4R)-1-[29-[[2-(acetylamino)-2-deoxy-beta-D-galactopyra nosyl]oxy]-14,14-bis[[3-[[3-[[5-[[2-(acetylamino)-2-deoxy-b eta-D-galactopyranosyl]oxy]-1-oxopentyl]amino]propyl]amino] -3-oxopropoxy]methyl]-1,12,19,25-tetraoxo-16-oxa-13,20,24-t riazanonacos-1-yl]-4-hydroxy-2-pyrrolidinyl)methyl ester
tatcatatattccttcctatt

SEQ ID NO: 5787 - RNA, 21 nt, synthetic construct
  source 1..21: mol_type = other RNA
  modified_base 1: mod_base = OTHER; note = 2'-O-methylcytidine-3'-phosphorothioate
  modified_base 2: mod_base = OTHER; note = 2'-O-methylcytidine-3'-phosphorothioate
  modified_base 3: mod_base = OTHER; note = 2'-O-methyluridine-3'-phosphate
  modified_base 4: mod_base = OTHER; note = 2'-O-methyladenosine-3'-phosphate
  modified_base 5: mod_base = OTHER; note = 2'-O-methyluridine-3'-phosphate
  modified_base 6: mod_base = OTHER; note = 2'-O-methyladenosine-3'-phosphate
  modified_base 7: mod_base = OTHER; note = 2'-deoxy-2'-fluorocytidine-3'-phosphate
  modified_base 8: mod_base = OTHER; note = 2'-O-methyladenosine-3'-phosphate
  modified_base 9: mod_base = OTHER; note = 2'-deoxy-2'-fluorouridine-3'-phosphate
  modified_base 10: mod_base = OTHER; note = 2'-deoxy-2'-fluorouridine-3'-phosphate
  modified_base 11: mod_base = OTHER; note = 2'-deoxy-2'-fluoroguanosine-3'-phosphate
  modified_base 12: mod_base = OTHER; note = 2'-O-methyluridine-3'-phosphate
  modified_base 13: mod_base = OTHER; note = 2'-O-methyluridine-3'-phosphate
  modified_base 14: mod_base = OTHER; note = 2'-O-methyluridine-3'-phosphate
  modified_base 15: mod_base = OTHER; note = 2'-O-methyladenosine-3'-phosphate
  modified_base 16: mod_base = OTHER; note = 2'-O-methylcytidine-3'-phosphate
  modified_base 17: mod_base = OTHER; note = 2'-O-methyladenosine-3'-phosphate
  modified_base 18: mod_base = OTHER; note = 2'-O-methylcytidine-3'-phosphate
  modified_base 19: mod_base = OTHER; note = 2'-O-methyluridine-3'-phosphate
  modified_base 20: mod_base = OTHER; note = 2'-O-methyluridine-3'-phosphate
  modified_base 21: mod_base = OTHER; note = 2'-O-methyluridine-3'-phosphate ((2S,4R)-1-[29-[[2-(acetylamino)-2-deoxy-beta-D-galactopyra nosyl]oxy]-14,14-bis[[3-[[3-[[5-[[2-(acetylamino)-2-deoxy-b eta-D-galactopyranosyl]oxy]-1-oxopentyl]amino]propyl]amino] -3-oxopropoxy]methyl]-1,12,19,25-tetraoxo-16-oxa-13,20,24-t riazanonacos-1-yl]-4-hydroxy-2-pyrrolidinyl)methyl ester
cctatacattgtttacacttt

SEQ ID NO: 5788 - RNA, 21 nt, synthetic construct
  source 1..21: mol_type = other RNA
  modified_base 1: mod_base = OTHER; note = 2'-O-methylcytidine-3'-phosphorothioate
  modified_base 2: mod_base = OTHER; note = 2'-O-methylcytidine-3'-phosphorothioate
  modified_base 3: mod_base = OTHER; note = 2'-O-methyladenosine-3'-phosphate
  modified_base 4: mod_base = OTHER; note = 2'-O-methylcytidine-3'-phosphate
  modified_base 5: mod_base = OTHER; note = 2'-O-methyladenosine-3'-phosphate
  modified_base 6: mod_base = OTHER; note = 2'-O-methylcytidine-3'-phosphate
  modified_base 7: mod_base = OTHER; note = 2'-deoxy-2'-fluoroadenosine-3'-phosphate
  modified_base 8: mod_base = OTHER; note = 2'-O-methyladenosine-3'-phosphate
  modified_base 9: mod_base = OTHER; note = 2'-deoxy-2'-fluoroadenosine-3'-phosphate
  modified_base 10: mod_base = OTHER; note = 2'-deoxy-2'-fluorocytidine-3'-phosphate
  modified_base 11: mod_base = OTHER; note = 2'-deoxy-2'-fluorouridine-3'-phosphate
  modified_base 12: mod_base = OTHER; note = 2'-O-methyluridine-3'-phosphate
  modified_base 13: mod_base = OTHER; note = 2'-O-methyladenosine-3'-phosphate
  modified_base 14: mod_base = OTHER; note = 2'-O-methyladenosine-3'-phosphate
  modified_base 15: mod_base = OTHER; note = 2'-O-methyladenosine-3'-phosphate
  modified_base 16: mod_base = OTHER; note = 2'-O-methyluridine-3'-phosphate
  modified_base 17: mod_base = OTHER; note = 2'-O-methyluridine-3'-phosphate
  modified_base 18: mod_base = OTHER; note = 2'-O-methyladenosine-3'-phosphate
  modified_base 19: mod_base = OTHER; note = 2'-O-methylcytidine-3'-phosphate
  modified_base 20: mod_base = OTHER; note = 2'-O-methyluridine-3'-phosphate
  modified_base 21: mod_base = OTHER; note = 2'-O-methyluridine-3'-phosphate ((2S,4R)-1-[29-[[2-(acetylamino)-2-deoxy-beta-D-galactopyra nosyl]oxy]-14,14-bis[[3-[[3-[[5-[[2-(acetylamino)-2-deoxy-b eta-D-galactopyranosyl]oxy]-1-oxopentyl]amino]propyl]amino] -3-oxopropoxy]methyl]-1,12,19,25-tetraoxo-16-oxa-13,20,24-t riazanonacos-1-yl]-4-hydroxy-2-pyrrolidinyl)methyl ester
ccacacaaacttaaattactt

SEQ ID NO: 5789 - RNA, 21 nt, synthetic construct
  source 1..21: mol_type = other RNA
  modified_base 1: mod_base = OTHER; note = 2'-O-methyluridine-3'-phosphorothioate
  modified_base 2: mod_base = OTHER; note = 2'-O-methyluridine-3'-phosphorothioate
  modified_base 3: mod_base = OTHER; note = 2'-O-methyladenosine-3'-phosphate
  modified_base 4: mod_base = OTHER; note = 2'-O-methylcytidine-3'-phosphate
  modified_base 5: mod_base = OTHER; note = 2'-O-methyluridine-3'-phosphate
  modified_base 6: mod_base = OTHER; note = 2'-O-methylguanosine-3'-phosphate
  modified_base 7: mod_base = OTHER; note = 2'-deoxy-2'-fluorouridine-3'-phosphate
  modified_base 8: mod_base = OTHER; note = 2'-O-methyluridine-3'-phosphate
  modified_base 9: mod_base = OTHER; note = 2'-deoxy-2'-fluoroguanosine-3'-phosphate
  modified_base 10: mod_base = OTHER; note = 2'-deoxy-2'-fluoroguanosine-3'-phosphate
  modified_base 11: mod_base = OTHER; note = 2'-deoxy-2'-fluorocytidine-3'-phosphate
  modified_base 12: mod_base = OTHER; note = 2'-O-methyladenosine-3'-phosphate
  modified_base 13: mod_base = OTHER; note = 2'-O-methyladenosine-3'-phosphate
  modified_base 14: mod_base = OTHER; note = 2'-O-methyladenosine-3'-phosphate
  modified_base 15: mod_base = OTHER; note = 2'-O-methyladenosine-3'-phosphate
  modified_base 16: mod_base = OTHER; note = 2'-O-methylcytidine-3'-phosphate
  modified_base 17: mod_base = OTHER; note = 2'-O-methyladenosine-3'-phosphate
  modified_base 18: mod_base = OTHER; note = 2'-O-methyladenosine-3'-phosphate
  modified_base 19: mod_base = OTHER; note = 2'-O-methyluridine-3'-phosphate
  modified_base 20: mod_base = OTHER; note = 2'-O-methyladenosine-3'-phosphate
  modified_base 21: mod_base = OTHER; note = 2'-O-methyluridine-3'-phosphate ((2S,4R)-1-[29-[[2-(acetylamino)-2-deoxy-beta-D-galactopyra nosyl]oxy]-14,14-bis[[3-[[3-[[5-[[2-(acetylamino)-2-deoxy-b eta-D-galactopyranosyl]oxy]-1-oxopentyl]amino]propyl]amino] -3-oxopropoxy]methyl]-1,12,19,25-tetraoxo-16-oxa-13,20,24-t riazanonacos-1-yl]-4-hydroxy-2-pyrrolidinyl)methyl ester
ttactgttggcaaaacaatat

SEQ ID NO: 5790 - RNA, 21 nt, synthetic construct
  source 1..21: mol_type = other RNA
  modified_base 1: mod_base = OTHER; note = 2'-O-methylcytidine-3'-phosphorothioate
  modified_base 2: mod_base = OTHER; note = 2'-O-methylcytidine-3'-phosphorothioate
  modified_base 3: mod_base = OTHER; note = 2'-O-methyladenosine-3'-phosphate
  modified_base 4: mod_base = OTHER; note = 2'-O-methyladenosine-3'-phosphate
  modified_base 5: mod_base = OTHER; note = 2'-O-methylguanosine-3'-phosphate
  modified_base 6: mod_base = OTHER; note = 2'-O-methyluridine-3'-phosphate
  modified_base 7: mod_base = OTHER; note = 2'-deoxy-2'-fluoroadenosine-3'-phosphate
  modified_base 8: mod_base = OTHER; note = 2'-O-methylcytidine-3'-phosphate
  modified_base 9: mod_base = OTHER; note = 2'-deoxy-2'-fluoroadenosine-3'-phosphate
  modified_base 10: mod_base = OTHER; note = 2'-deoxy-2'-fluoroadenosine-3'-phosphate
  modified_base 11: mod_base = OTHER; note = 2'-deoxy-2'-fluorocytidine-3'-phosphate
  modified_base 12: mod_base = OTHER; note = 2'-O-methyluridine-3'-phosphate
  modified_base 13: mod_base = OTHER; note = 2'-O-methylcytidine-3'-phosphate
  modified_base 14: mod_base = OTHER; note = 2'-O-methyluridine-3'-phosphate
  modified_base 15: mod_base = OTHER; note = 2'-O-methyluridine-3'-phosphate
  modified_base 16: mod_base = OTHER; note = 2'-O-methylcytidine-3'-phosphate
  modified_base 17: mod_base = OTHER; note = 2'-O-methyladenosine-3'-phosphate
  modified_base 18: mod_base = OTHER; note = 2'-O-methyluridine-3'-phosphate
  modified_base 19: mod_base = OTHER; note = 2'-O-methylcytidine-3'-phosphate
  modified_base 20: mod_base = OTHER; note = 2'-O-methyladenosine-3'-phosphate
  modified_base 21: mod_base = OTHER; note = 2'-O-methyluridine-3'-phosphate ((2S,4R)-1-[29-[[2-(acetylamino)-2-deoxy-beta-D-galactopyra nosyl]oxy]-14,14-bis[[3-[[3-[[5-[[2-(acetylamino)-2-deoxy-b eta-D-galactopyranosyl]oxy]-1-oxopentyl]amino]propyl]amino] -3-oxopropoxy]methyl]-1,12,19,25-tetraoxo-16-oxa-13,20,24-t riazanonacos-1-yl]-4-hydroxy-2-pyrrolidinyl)methyl ester
ccaagtacaactcttcatcat

SEQ ID NO: 5791 - RNA, 21 nt, synthetic construct
  source 1..21: mol_type = other RNA
  modified_base 1: mod_base = OTHER; note = 2'-O-methylcytidine-3'-phosphorothioate
  modified_base 2: mod_base = OTHER; note = 2'-O-methyladenosine-3'-phosphorothioate
  modified_base 3: mod_base = OTHER; note = 2'-O-methyluridine-3'-phosphate
  modified_base 4: mod_base = OTHER; note = 2'-O-methylcytidine-3'-phosphate
  modified_base 5: mod_base = OTHER; note = 2'-O-methyladenosine-3'-phosphate
  modified_base 6: mod_base = OTHER; note = 2'-O-methyladenosine-3'-phosphate
  modified_base 7: mod_base = OTHER; note = 2'-deoxy-2'-fluoroguanosine-3'-phosphate
  modified_base 8: mod_base = OTHER; note = 2'-O-methyluridine-3'-phosphate
  modified_base 9: mod_base = OTHER; note = 2'-deoxy-2'-fluorouridine-3'-phosphate
  modified_base 10: mod_base = OTHER; note = 2'-deoxy-2'-fluorouridine-3'-phosphate
  modified_base 11: mod_base = OTHER; note = 2'-deoxy-2'-fluorocytidine-3'-phosphate
  modified_base 12: mod_base = OTHER; note = 2'-O-methyluridine-3'-phosphate
  modified_base 13: mod_base = OTHER; note = 2'-O-methylcytidine-3'-phosphate
  modified_base 14: mod_base = OTHER; note = 2'-O-methyluridine-3'-phosphate
  modified_base 15: mod_base = OTHER; note = 2'-O-methylguanosine-3'-phosphate
  modified_base 16: mod_base = OTHER; note = 2'-O-methyluridine-3'-phosphate
  modified_base 17: mod_base = OTHER; note = 2'-O-methyluridine-3'-phosphate
  modified_base 18: mod_base = OTHER; note = 2'-O-methyladenosine-3'-phosphate
  modified_base 19: mod_base = OTHER; note = 2'-O-methyladenosine-3'-phosphate
  modified_base 20: mod_base = OTHER; note = 2'-O-methyluridine-3'-phosphate
  modified_base 21: mod_base = OTHER; note = 2'-O-methyluridine-3'-phosphate ((2S,4R)-1-[29-[[2-(acetylamino)-2-deoxy-beta-D-galactopyra nosyl]oxy]-14,14-bis[[3-[[3-[[5-[[2-(acetylamino)-2-deoxy-b eta-D-galactopyranosyl]oxy]-1-oxopentyl]amino]propyl]amino] -3-oxopropoxy]methyl]-1,12,19,25-tetraoxo-16-oxa-13,20,24-t riazanonacos-1-yl]-4-hydroxy-2-pyrrolidinyl)methyl ester
catcaagtttctctgttaatt

SEQ ID NO: 5792 - RNA, 21 nt, synthetic construct
  source 1..21: mol_type = other RNA
  modified_base 1: mod_base = OTHER; note = 2'-O-methylcytidine-3'-phosphorothioate
  modified_base 2: mod_base = OTHER; note = 2'-O-methyladenosine-3'-phosphorothioate
  modified_base 3: mod_base = OTHER; note = 2'-O-methylguanosine-3'-phosphate
  modified_base 4: mod_base = OTHER; note = 2'-O-methyladenosine-3'-phosphate
  modified_base 5: mod_base = OTHER; note = 2'-O-methylcytidine-3'-phosphate
  modified_base 6: mod_base = OTHER; note = 2'-O-methyluridine-3'-phosphate
  modified_base 7: mod_base = OTHER; note = 2'-deoxy-2'-fluorouridine-3'-phosphate
  modified_base 8: mod_base = OTHER; note = 2'-O-methyladenosine-3'-phosphate
  modified_base 9: mod_base = OTHER; note = 2'-deoxy-2'-fluoroadenosine-3'-phosphate
  modified_base 10: mod_base = OTHER; note = 2'-deoxy-2'-fluoroguanosine-3'-phosphate
  modified_base 11: mod_base = OTHER; note = 2'-deoxy-2'-fluoroadenosine-3'-phosphate
  modified_base 12: mod_base = OTHER; note = 2'-O-methyladenosine-3'-phosphate
  modified_base 13: mod_base = OTHER; note = 2'-O-methylcytidine-3'-phosphate
  modified_base 14: mod_base = OTHER; note = 2'-O-methyluridine-3'-phosphate
  modified_base 15: mod_base = OTHER; note = 2'-O-methyladenosine-3'-phosphate
  modified_base 16: mod_base = OTHER; note = 2'-O-methyluridine-3'-phosphate
  modified_base 17: mod_base = OTHER; note = 2'-O-methyluridine-3'-phosphate
  modified_base 18: mod_base = OTHER; note = 2'-O-methylguanosine-3'-phosphate
  modified_base 19: mod_base = OTHER; note = 2'-O-methyluridine-3'-phosphate
  modified_base 20: mod_base = OTHER; note = 2'-O-methyluridine-3'-phosphate
  modified_base 21: mod_base = OTHER; note = 2'-O-methyluridine-3'-phosphate ((2S,4R)-1-[29-[[2-(acetylamino)-2-deoxy-beta-D-galactopyra nosyl]oxy]-14,14-bis[[3-[[3-[[5-[[2-(acetylamino)-2-deoxy-b eta-D-galactopyranosyl]oxy]-1-oxopentyl]amino]propyl]amino] -3-oxopropoxy]methyl]-1,12,19,25-tetraoxo-16-oxa-13,20,24-t riazanonacos-1-yl]-4-hydroxy-2-pyrrolidinyl)methyl ester
cagacttaagaactattgttt

SEQ ID NO: 5793 - RNA, 21 nt, synthetic construct
  source 1..21: mol_type = other RNA
  modified_base 1: mod_base = OTHER; note = 2'-O-methyluridine-3'-phosphorothioate
  modified_base 2: mod_base = OTHER; note = 2'-O-methyluridine-3'-phosphorothioate
  modified_base 3: mod_base = OTHER; note = 2'-O-methylcytidine-3'-phosphate
  modified_base 4: mod_base = OTHER; note = 2'-O-methyluridine-3'-phosphate
  modified_base 5: mod_base = OTHER; note = 2'-O-methylcytidine-3'-phosphate
  modified_base 6: mod_base = OTHER; note = 2'-O-methyluridine-3'-phosphate
  modified_base 7: mod_base = OTHER; note = 2'-deoxy-2'-fluoroguanosine-3'-phosphate
  modified_base 8: mod_base = OTHER; note = 2'-O-methyladenosine-3'-phosphate
  modified_base 9: mod_base = OTHER; note = 2'-deoxy-2'-fluoroadenosine-3'-phosphate
  modified_base 10: mod_base = OTHER; note = 2'-deoxy-2'-fluorouridine-3'-phosphate
  modified_base 11: mod_base = OTHER; note = 2'-deoxy-2'-fluoroguanosine-3'-phosphate
  modified_base 12: mod_base = OTHER; note = 2'-O-methyladenosine-3'-phosphate
  modified_base 13: mod_base = OTHER; note = 2'-O-methylcytidine-3'-phosphate
  modified_base 14: mod_base = OTHER; note = 2'-O-methyladenosine-3'-phosphate
  modified_base 15: mod_base = OTHER; note = 2'-O-methylguanosine-3'-phosphate
  modified_base 16: mod_base = OTHER; note = 2'-O-methyluridine-3'-phosphate
  modified_base 17: mod_base = OTHER; note = 2'-O-methyluridine-3'-phosphate
  modified_base 18: mod_base = OTHER; note = 2'-O-methylguanosine-3'-phosphate
  modified_base 19: mod_base = OTHER; note = 2'-O-methyluridine-3'-phosphate
  modified_base 20: mod_base = OTHER; note = 2'-O-methyladenosine-3'-phosphate
  modified_base 21: mod_base = OTHER; note = 2'-O-methyluridine-3'-phosphate ((2S,4R)-1-[29-[[2-(acetylamino)-2-deoxy-beta-D-galactopyra nosyl]oxy]-14,14-bis[[3-[[3-[[5-[[2-(acetylamino)-2-deoxy-b eta-D-galactopyranosyl]oxy]-1-oxopentyl]amino]propyl]amino] -3-oxopropoxy]methyl]-1,12,19,25-tetraoxo-16-oxa-13,20,24-t riazanonacos-1-yl]-4-hydroxy-2-pyrrolidinyl)methyl ester
ttctctgaatgacagttgtat

SEQ ID NO: 5794 - RNA, 21 nt, synthetic construct
  source 1..21: mol_type = other RNA
  modified_base 1: mod_base = OTHER; note = 2'-O-methylguanosine-3'-phosphorothioate
  modified_base 2: mod_base = OTHER; note = 2'-O-methyladenosine-3'-phosphorothioate
  modified_base 3: mod_base = OTHER; note = 2'-O-methyladenosine-3'-phosphate
  modified_base 4: mod_base = OTHER; note = 2'-O-methylcytidine-3'-phosphate
  modified_base 5: mod_base = OTHER; note = 2'-O-methyluridine-3'-phosphate
  modified_base 6: mod_base = OTHER; note = 2'-O-methylcytidine-3'-phosphate
  modified_base 7: mod_base = OTHER; note = 2'-deoxy-2'-fluorouridine-3'-phosphate
  modified_base 8: mod_base = OTHER; note = 2'-O-methyluridine-3'-phosphate
  modified_base 9: mod_base = OTHER; note = 2'-deoxy-2'-fluorouridine-3'-phosphate
  modified_base 10: mod_base = OTHER; note = 2'-deoxy-2'-fluoroguanosine-3'-phosphate
  modified_base 11: mod_base = OTHER; note = 2'-deoxy-2'-fluorocytidine-3'-phosphate
  modified_base 12: mod_base = OTHER; note = 2'-O-methyluridine-3'-phosphate
  modified_base 13: mod_base = OTHER; note = 2'-O-methylguanosine-3'-phosphate
  modified_base 14: mod_base = OTHER; note = 2'-O-methyluridine-3'-phosphate
  modified_base 15: mod_base = OTHER; note = 2'-O-methyluridine-3'-phosphate
  modified_base 16: mod_base = OTHER; note = 2'-O-methyladenosine-3'-phosphate
  modified_base 17: mod_base = OTHER; note = 2'-O-methyladenosine-3'-phosphate
  modified_base 18: mod_base = OTHER; note = 2'-O-methyluridine-3'-phosphate
  modified_base 19: mod_base = OTHER; note = 2'-O-methylcytidine-3'-phosphate
  modified_base 20: mod_base = OTHER; note = 2'-O-methyluridine-3'-phosphate
  modified_base 21: mod_base = OTHER; note = 2'-O-methyluridine-3'-phosphate ((2S,4R)-1-[29-[[2-(acetylamino)-2-deoxy-beta-D-galactopyra nosyl]oxy]-14,14-bis[[3-[[3-[[5-[[2-(acetylamino)-2-deoxy-b eta-D-galactopyranosyl]oxy]-1-oxopentyl]amino]propyl]amino] -3-oxopropoxy]methyl]-1,12,19,25-tetraoxo-16-oxa-13,20,24-t riazanonacos-1-yl]-4-hydroxy-2-pyrrolidinyl)methyl ester
gaactctttgctgttaatctt

SEQ ID NO: 5795 - RNA, 21 nt, synthetic construct
  source 1..21: mol_type = other RNA
  modified_base 1: mod_base = OTHER; note = 2'-O-methylcytidine-3'-phosphorothioate
  modified_base 2: mod_base = OTHER; note = 2'-O-methyluridine-3'-phosphorothioate
  modified_base 3: mod_base = OTHER; note = 2'-O-methylguanosine-3'-phosphate
  modified_base 4: mod_base = OTHER; note = 2'-O-methylguanosine-3'-phosphate
  modified_base 5: mod_base = OTHER; note = 2'-O-methyluridine-3'-phosphate
  modified_base 6: mod_base = OTHER; note = 2'-O-methyluridine-3'-phosphate
  modified_base 7: mod_base = OTHER; note = 2'-deoxy-2'-fluoroadenosine-3'-phosphate
  modified_base 8: mod_base = OTHER; note = 2'-O-methyladenosine-3'-phosphate
  modified_base 9: mod_base = OTHER; note = 2'-deoxy-2'-fluoroadenosine-3'-phosphate
  modified_base 10: mod_base = OTHER; note = 2'-deoxy-2'-fluoroadenosine-3'-phosphate
  modified_base 11: mod_base = OTHER; note = 2'-deoxy-2'-fluorouridine-3'-phosphate
  modified_base 12: mod_base = OTHER; note = 2'-O-methylguanosine-3'-phosphate
  modified_base 13: mod_base = OTHER; note = 2'-O-methylguanosine-3'-phosphate
  modified_base 14: mod_base = OTHER; note = 2'-O-methyladenosine-3'-phosphate
  modified_base 15: mod_base = OTHER; note = 2'-O-methyluridine-3'-phosphate
  modified_base 16: mod_base = OTHER; note = 2'-O-methylguanosine-3'-phosphate
  modified_base 17: mod_base = OTHER; note = 2'-O-methyladenosine-3'-phosphate
  modified_base 18: mod_base = OTHER; note = 2'-O-methyluridine-3'-phosphate
  modified_base 19: mod_base = OTHER; note = 2'-O-methyluridine-3'-phosphate
  modified_base 20: mod_base = OTHER; note = 2'-O-methyluridine-3'-phosphate
  modified_base 21: mod_base = OTHER; note = 2'-O-methyluridine-3'-phosphate ((2S,4R)-1-[29-[[2-(acetylamino)-2-deoxy-beta-D-galactopyra nosyl]oxy]-14,14-bis[[3-[[3-[[5-[[2-(acetylamino)-2-deoxy-b eta-D-galactopyranosyl]oxy]-1-oxopentyl]amino]propyl]amino] -3-oxopropoxy]methyl]-1,12,19,25-tetraoxo-16-oxa-13,20,24-t riazanonacos-1-yl]-4-hydroxy-2-pyrrolidinyl)methyl ester
ctggttaaaatggatgatttt

SEQ ID NO: 5796 - RNA, 21 nt, synthetic construct
  source 1..21: mol_type = other RNA
  modified_base 1: mod_base = OTHER; note = 2'-O-methyluridine-3'-phosphorothioate
  modified_base 2: mod_base = OTHER; note = 2'-O-methyluridine-3'-phosphorothioate
  modified_base 3: mod_base = OTHER; note = 2'-O-methylguanosine-3'-phosphate
  modified_base 4: mod_base = OTHER; note = 2'-O-methyladenosine-3'-phosphate
  modified_base 5: mod_base = OTHER; note = 2'-O-methyladenosine-3'-phosphate
  modified_base 6: mod_base = OTHER; note = 2'-O-methyladenosine-3'-phosphate
  modified_base 7: mod_base = OTHER; note = 2'-deoxy-2'-fluoroguanosine-3'-phosphate
  modified_base 8: mod_base = OTHER; note = 2'-O-methyluridine-3'-phosphate
  modified_base 9: mod_base = OTHER; note = 2'-deoxy-2'-fluorouridine-3'-phosphate
  modified_base 10: mod_base = OTHER; note = 2'-deoxy-2'-fluorouridine-3'-phosphate
  modified_base 11: mod_base = OTHER; note = 2'-deoxy-2'-fluorouridine-3'-phosphate
  modified_base 12: mod_base = OTHER; note = 2'-O-methylguanosine-3'-phosphate
  modified_base 13: mod_base = OTHER; note = 2'-O-methylcytidine-3'-phosphate
  modified_base 14: mod_base = OTHER; note = 2'-O-methyluridine-3'-phosphate
  modified_base 15: mod_base = OTHER; note = 2'-O-methylguanosine-3'-phosphate
  modified_base 16: mod_base = OTHER; note = 2'-O-methyladenosine-3'-phosphate
  modified_base 17: mod_base = OTHER; note = 2'-O-methyluridine-3'-phosphate
  modified_base 18: mod_base = OTHER; note = 2'-O-methyluridine-3'-phosphate
  modified_base 19: mod_base = OTHER; note = 2'-O-methyladenosine-3'-phosphate
  modified_base 20: mod_base = OTHER; note = 2'-O-methyladenosine-3'-phosphate
  modified_base 21: mod_base = OTHER; note = 2'-O-methyluridine-3'-phosphate ((2S,4R)-1-[29-[[2-(acetylamino)-2-deoxy-beta-D-galactopyra nosyl]oxy]-14,14-bis[[3-[[3-[[5-[[2-(acetylamino)-2-deoxy-b eta-D-galactopyranosyl]oxy]-1-oxopentyl]amino]propyl]amino] -3-oxopropoxy]methyl]-1,12,19,25-tetraoxo-16-oxa-13,20,24-t riazanonacos-1-yl]-4-hydroxy-2-pyrrolidinyl)methyl ester
ttgaaagttttgctgattaat

SEQ ID NO: 5797 - RNA, 21 nt, synthetic construct
  source 1..21: mol_type = other RNA
  modified_base 1: mod_base = OTHER; note = 2'-O-methyluridine-3'-phosphorothioate
  modified_base 2: mod_base = OTHER; note = 2'-O-methyladenosine-3'-phosphorothioate
  modified_base 3: mod_base = OTHER; note = 2'-O-methyladenosine-3'-phosphate
  modified_base 4: mod_base = OTHER; note = 2'-O-methylcytidine-3'-phosphate
  modified_base 5: mod_base = OTHER; note = 2'-O-methyladenosine-3'-phosphate
  modified_base 6: mod_base = OTHER; note = 2'-O-methyladenosine-3'-phosphate
  modified_base 7: mod_base = OTHER; note = 2'-deoxy-2'-fluorouridine-3'-phosphate
  modified_base 8: mod_base = OTHER; note = 2'-O-methyluridine-3'-phosphate
  modified_base 9: mod_base = OTHER; note = 2'-deoxy-2'-fluoroadenosine-3'-phosphate
  modified_base 10: mod_base = OTHER; note = 2'-deoxy-2'-fluoroadenosine-3'-phosphate
  modified_base 11: mod_base = OTHER; note = 2'-deoxy-2'-fluoroadenosine-3'-phosphate
  modified_base 12: mod_base = OTHER; note = 2'-O-methylguanosine-3'-phosphate
  modified_base 13: mod_base = OTHER; note = 2'-O-methyluridine-3'-phosphate
  modified_base 14: mod_base = OTHER; note = 2'-O-methylguanosine-3'-phosphate
  modified_base 15: mod_base = OTHER; note = 2'-O-methylguanosine-3'-phosphate
  modified_base 16: mod_base = OTHER; note = 2'-O-methylguanosine-3'-phosphate
  modified_base 17: mod_base = OTHER; note = 2'-O-methyladenosine-3'-phosphate
  modified_base 18: mod_base = OTHER; note = 2'-O-methyluridine-3'-phosphate
  modified_base 19: mod_base = OTHER; note = 2'-O-methylguanosine-3'-phosphate
  modified_base 20: mod_base = OTHER; note = 2'-O-methyladenosine-3'-phosphate
  modified_base 21: mod_base = OTHER; note = 2'-O-methyluridine-3'-phosphate ((2S,4R)-1-[29-[[2-(acetylamino)-2-deoxy-beta-D-galactopyra nosyl]oxy]-14,14-bis[[3-[[3-[[5-[[2-(acetylamino)-2-deoxy-b eta-D-galactopyranosyl]oxy]-1-oxopentyl]amino]propyl]amino] -3-oxopropoxy]methyl]-1,12,19,25-tetraoxo-16-oxa-13,20,24-t riazanonacos-1-yl]-4-hydroxy-2-pyrrolidinyl)methyl ester
taacaattaaagtgggatgat

SEQ ID NO: 5798 - RNA, 21 nt, synthetic construct
  source 1..21: mol_type = other RNA
  modified_base 1: mod_base = OTHER; note = 2'-O-methylguanosine-3'-phosphorothioate
  modified_base 2: mod_base = OTHER; note = 2'-O-methylguanosine-3'-phosphorothioate
  modified_base 3: mod_base = OTHER; note = 2'-O-methylguanosine-3'-phosphate
  modified_base 4: mod_base = OTHER; note = 2'-O-methylcytidine-3'-phosphate
  modified_base 5: mod_base = OTHER; note = 2'-O-methyladenosine-3'-phosphate
  modified_base 6: mod_base = OTHER; note = 2'-O-methyladenosine-3'-phosphate
  modified_base 7: mod_base = OTHER; note = 2'-deoxy-2'-fluoroadenosine-3'-phosphate
  modified_base 8: mod_base = OTHER; note = 2'-O-methyladenosine-3'-phosphate
  modified_base 9: mod_base = OTHER; note = 2'-deoxy-2'-fluorouridine-3'-phosphate
  modified_base 10: mod_base = OTHER; note = 2'-deoxy-2'-fluorocytidine-3'-phosphate
  modified_base 11: mod_base = OTHER; note = 2'-deoxy-2'-fluoroadenosine-3'-phosphate
  modified_base 12: mod_base = OTHER; note = 2'-O-methylcytidine-3'-phosphate
  modified_base 13: mod_base = OTHER; note = 2'-O-methyluridine-3'-phosphate
  modified_base 14: mod_base = OTHER; note = 2'-O-methyluridine-3'-phosphate
  modified_base 15: mod_base = OTHER; note = 2'-O-methyladenosine-3'-phosphate
  modified_base 16: mod_base = OTHER; note = 2'-O-methyluridine-3'-phosphate
  modified_base 17: mod_base = OTHER; note = 2'-O-methylguanosine-3'-phosphate
  modified_base 18: mod_base = OTHER; note = 2'-O-methyladenosine-3'-phosphate
  modified_base 19: mod_base = OTHER; note = 2'-O-methyladenosine-3'-phosphate
  modified_base 20: mod_base = OTHER; note = 2'-O-methyladenosine-3'-phosphate
  modified_base 21: mod_base = OTHER; note = 2'-O-methyluridine-3'-phosphate ((2S,4R)-1-[29-[[2-(acetylamino)-2-deoxy-beta-D-galactopyra nosyl]oxy]-14,14-bis[[3-[[3-[[5-[[2-(acetylamino)-2-deoxy-b eta-D-galactopyranosyl]oxy]-1-oxopentyl]amino]propyl]amino] -3-oxopropoxy]methyl]-1,12,19,25-tetraoxo-16-oxa-13,20,24-t riazanonacos-1-yl]-4-hydroxy-2-pyrrolidinyl)methyl ester
gggcaaaatcacttatgaaat

SEQ ID NO: 5799 - RNA, 21 nt, synthetic construct
  source 1..21: mol_type = other RNA
  modified_base 1: mod_base = OTHER; note = 2'-O-methyladenosine-3'-phosphorothioate
  modified_base 2: mod_base = OTHER; note = 2'-O-methyladenosine-3'-phosphorothioate
  modified_base 3: mod_base = OTHER; note = 2'-O-methylguanosine-3'-phosphate
  modified_base 4: mod_base = OTHER; note = 2'-O-methylcytidine-3'-phosphate
  modified_base 5: mod_base = OTHER; note = 2'-O-methyladenosine-3'-phosphate
  modified_base 6: mod_base = OTHER; note = 2'-O-methyladenosine-3'-phosphate
  modified_base 7: mod_base = OTHER; note = 2'-deoxy-2'-fluoroguanosine-3'-phosphate
  modified_base 8: mod_base = OTHER; note = 2'-O-methyladenosine-3'-phosphate
  modified_base 9: mod_base = OTHER; note = 2'-deoxy-2'-fluoroadenosine-3'-phosphate
  modified_base 10: mod_base = OTHER; note = 2'-deoxy-2'-fluorouridine-3'-phosphate
  modified_base 11: mod_base = OTHER; note = 2'-deoxy-2'-fluorocytidine-3'-phosphate
  modified_base 12: mod_base = OTHER; note = 2'-O-methyladenosine-3'-phosphate
  modified_base 13: mod_base = OTHER; note = 2'-O-methylguanosine-3'-phosphate
  modified_base 14: mod_base = OTHER; note = 2'-O-methyluridine-3'-phosphate
  modified_base 15: mod_base = OTHER; note = 2'-O-methyluridine-3'-phosphate
  modified_base 16: mod_base = OTHER; note = 2'-O-methylguanosine-3'-phosphate
  modified_base 17: mod_base = OTHER; note = 2'-O-methylguanosine-3'-phosphate
  modified_base 18: mod_base = OTHER; note = 2'-O-methyluridine-3'-phosphate
  modified_base 19: mod_base = OTHER; note = 2'-O-methyluridine-3'-phosphate
  modified_base 20: mod_base = OTHER; note = 2'-O-methyluridine-3'-phosphate
  modified_base 21: mod_base = OTHER; note = 2'-O-methyluridine-3'-phosphate ((2S,4R)-1-[29-[[2-(acetylamino)-2-deoxy-beta-D-galactopyra nosyl]oxy]-14,14-bis[[3-[[3-[[5-[[2-(acetylamino)-2-deoxy-b eta-D-galactopyranosyl]oxy]-1-oxopentyl]amino]propyl]amino] -3-oxopropoxy]methyl]-1,12,19,25-tetraoxo-16-oxa-13,20,24-t riazanonacos-1-yl]-4-hydroxy-2-pyrrolidinyl)methyl ester
aagcaagaatcagttggtttt

SEQ ID NO: 5800 - RNA, 21 nt, synthetic construct
  source 1..21: mol_type = other RNA
  modified_base 1: mod_base = OTHER; note = 2'-O-methylguanosine-3'-phosphorothioate
  modified_base 2: mod_base = OTHER; note = 2'-O-methylguanosine-3'-phosphorothioate
  modified_base 3: mod_base = OTHER; note = 2'-O-methyluridine-3'-phosphate
  modified_base 4: mod_base = OTHER; note = 2'-O-methyluridine-3'-phosphate
  modified_base 5: mod_base = OTHER; note = 2'-O-methyluridine-3'-phosphate
  modified_base 6: mod_base = OTHER; note = 2'-O-methylguanosine-3'-phosphate
  modified_base 7: mod_base = OTHER; note = 2'-deoxy-2'-fluorocytidine-3'-phosphate
  modified_base 8: mod_base = OTHER; note = 2'-O-methyluridine-3'-phosphate
  modified_base 9: mod_base = OTHER; note = 2'-deoxy-2'-fluoroadenosine-3'-phosphate
  modified_base 10: mod_base = OTHER; note = 2'-deoxy-2'-fluorocytidine-3'-phosphate
  modified_base 11: mod_base = OTHER; note = 2'-deoxy-2'-fluorocytidine-3'-phosphate
  modified_base 12: mod_base = OTHER; note = 2'-O-methyladenosine-3'-phosphate
  modified_base 13: mod_base = OTHER; note = 2'-O-methylcytidine-3'-phosphate
  modified_base 14: mod_base = OTHER; note = 2'-O-methyladenosine-3'-phosphate
  modified_base 15: mod_base = OTHER; note = 2'-O-methyluridine-3'-phosphate
  modified_base 16: mod_base = OTHER; note = 2'-O-methyladenosine-3'-phosphate
  modified_base 17: mod_base = OTHER; note = 2'-O-methyladenosine-3'-phosphate
  modified_base 18: mod_base = OTHER; note = 2'-O-methyladenosine-3'-phosphate
  modified_base 19: mod_base = OTHER; note = 2'-O-methylguanosine-3'-phosphate
  modified_base 20: mod_base = OTHER; note = 2'-O-methylcytidine-3'-phosphate
  modified_base 21: mod_base = OTHER; note = 2'-O-methyluridine-3'-phosphate ((2S,4R)-1-[29-[[2-(acetylamino)-2-deoxy-beta-D-galactopyra nosyl]oxy]-14,14-bis[[3-[[3-[[5-[[2-(acetylamino)-2-deoxy-b eta-D-galactopyranosyl]oxy]-1-oxopentyl]amino]propyl]amino] -3-oxopropoxy]methyl]-1,12,19,25-tetraoxo-16-oxa-13,20,24-t riazanonacos-1-yl]-4-hydroxy-2-pyrrolidinyl)methyl ester
ggtttgctaccacataaagct

SEQ ID NO: 5801 - RNA, 21 nt, synthetic construct
  source 1..21: mol_type = other RNA
  modified_base 1: mod_base = OTHER; note = 2'-O-methylcytidine-3'-phosphorothioate
  modified_base 2: mod_base = OTHER; note = 2'-O-methyladenosine-3'-phosphorothioate
  modified_base 3: mod_base = OTHER; note = 2'-O-methyluridine-3'-phosphate
  modified_base 4: mod_base = OTHER; note = 2'-O-methylguanosine-3'-phosphate
  modified_base 5: mod_base = OTHER; note = 2'-O-methylcytidine-3'-phosphate
  modified_base 6: mod_base = OTHER; note = 2'-O-methyluridine-3'-phosphate
  modified_base 7: mod_base = OTHER; note = 2'-deoxy-2'-fluoroguanosine-3'-phosphate
  modified_base 8: mod_base = OTHER; note = 2'-O-methyluridine-3'-phosphate
  modified_base 9: mod_base = OTHER; note = 2'-deoxy-2'-fluorouridine-3'-phosphate
  modified_base 10: mod_base = OTHER; note = 2'-deoxy-2'-fluorouridine-3'-phosphate
  modified_base 11: mod_base = OTHER; note = 2'-deoxy-2'-fluorouridine-3'-phosphate
  modified_base 12: mod_base = OTHER; note = 2'-O-methyluridine-3'-phosphate
  modified_base 13: mod_base = OTHER; note = 2'-O-methylguanosine-3'-phosphate
  modified_base 14: mod_base = OTHER; note = 2'-O-methylguanosine-3'-phosphate
  modified_base 15: mod_base = OTHER; note = 2'-O-methyluridine-3'-phosphate
  modified_base 16: mod_base = OTHER; note = 2'-O-methylcytidine-3'-phosphate
  modified_base 17: mod_base = OTHER; note = 2'-O-methyladenosine-3'-phosphate
  modified_base 18: mod_base = OTHER; note = 2'-O-methyladenosine-3'-phosphate
  modified_base 19: mod_base = OTHER; note = 2'-O-methyladenosine-3'-phosphate
  modified_base 20: mod_base = OTHER; note = 2'-O-methylcytidine-3'-phosphate
  modified_base 21: mod_base = OTHER; note = 2'-O-methyluridine-3'-phosphate ((2S,4R)-1-[29-[[2-(acetylamino)-2-deoxy-beta-D-galactopyra nosyl]oxy]-14,14-bis[[3-[[3-[[5-[[2-(acetylamino)-2-deoxy-b eta-D-galactopyranosyl]oxy]-1-oxopentyl]amino]propyl]amino] -3-oxopropoxy]methyl]-1,12,19,25-tetraoxo-16-oxa-13,20,24-t riazanonacos-1-yl]-4-hydroxy-2-pyrrolidinyl)methyl ester
catgctgtttttggtcaaact

SEQ ID NO: 5802 - RNA, 21 nt, synthetic construct
  source 1..21: mol_type = other RNA
  modified_base 1: mod_base = OTHER; note = 2'-O-methylcytidine-3'-phosphorothioate
  modified_base 2: mod_base = OTHER; note = 2'-O-methyladenosine-3'-phosphorothioate
  modified_base 3: mod_base = OTHER; note = 2'-O-methyladenosine-3'-phosphate
  modified_base 4: mod_base = OTHER; note = 2'-O-methyladenosine-3'-phosphate
  modified_base 5: mod_base = OTHER; note = 2'-O-methylcytidine-3'-phosphate
  modified_base 6: mod_base = OTHER; note = 2'-O-methyluridine-3'-phosphate
  modified_base 7: mod_base = OTHER; note = 2'-deoxy-2'-fluoroguanosine-3'-phosphate
  modified_base 8: mod_base = OTHER; note = 2'-O-methyluridine-3'-phosphate
  modified_base 9: mod_base = OTHER; note = 2'-deoxy-2'-fluoroguanosine-3'-phosphate
  modified_base 10: mod_base = OTHER; note = 2'-deoxy-2'-fluorouridine-3'-phosphate
  modified_base 11: mod_base = OTHER; note = 2'-deoxy-2'-fluoroadenosine-3'-phosphate
  modified_base 12: mod_base = OTHER; note = 2'-O-methyladenosine-3'-phosphate
  modified_base 13: mod_base = OTHER; note = 2'-O-methyladenosine-3'-phosphate
  modified_base 14: mod_base = OTHER; note = 2'-O-methylcytidine-3'-phosphate
  modified_base 15: mod_base = OTHER; note = 2'-O-methyluridine-3'-phosphate
  modified_base 16: mod_base = OTHER; note = 2'-O-methylguanosine-3'-phosphate
  modified_base 17: mod_base = OTHER; note = 2'-O-methylguanosine-3'-phosphate
  modified_base 18: mod_base = OTHER; note = 2'-O-methyladenosine-3'-phosphate
  modified_base 19: mod_base = OTHER; note = 2'-O-methyladenosine-3'-phosphate
  modified_base 20: mod_base = OTHER; note = 2'-O-methyladenosine-3'-phosphate
  modified_base 21: mod_base = OTHER; note = 2'-O-methyluridine-3'-phosphate ((2S,4R)-1-[29-[[2-(acetylamino)-2-deoxy-beta-D-galactopyra nosyl]oxy]-14,14-bis[[3-[[3-[[5-[[2-(acetylamino)-2-deoxy-b eta-D-galactopyranosyl]oxy]-1-oxopentyl]amino]propyl]amino] -3-oxopropoxy]methyl]-1,12,19,25-tetraoxo-16-oxa-13,20,24-t riazanonacos-1-yl]-4-hydroxy-2-pyrrolidinyl)methyl ester
caaactgtgtaaactggaaat

SEQ ID NO: 5803 - RNA, 21 nt, synthetic construct
  source 1..21: mol_type = other RNA
  modified_base 1: mod_base = OTHER; note = 2'-O-methyluridine-3'-phosphorothioate
  modified_base 2: mod_base = OTHER; note = 2'-O-methylcytidine-3'-phosphorothioate
  modified_base 3: mod_base = OTHER; note = 2'-O-methyluridine-3'-phosphate
  modified_base 4: mod_base = OTHER; note = 2'-O-methylguanosine-3'-phosphate
  modified_base 5: mod_base = OTHER; note = 2'-O-methyladenosine-3'-phosphate
  modified_base 6: mod_base = OTHER; note = 2'-O-methylguanosine-3'-phosphate
  modified_base 7: mod_base = OTHER; note = 2'-deoxy-2'-fluorouridine-3'-phosphate
  modified_base 8: mod_base = OTHER; note = 2'-O-methyluridine-3'-phosphate
  modified_base 9: mod_base = OTHER; note = 2'-deoxy-2'-fluorouridine-3'-phosphate
  modified_base 10: mod_base = OTHER; note = 2'-deoxy-2'-fluoroadenosine-3'-phosphate
  modified_base 11: mod_base = OTHER; note = 2'-deoxy-2'-fluoroadenosine-3'-phosphate
  modified_base 12: mod_base = OTHER; note = 2'-O-methyluridine-3'-phosphate
  modified_base 13: mod_base = OTHER; note = 2'-O-methylcytidine-3'-phosphate
  modified_base 14: mod_base = OTHER; note = 2'-O-methyladenosine-3'-phosphate
  modified_base 15: mod_base = OTHER; note = 2'-O-methylcytidine-3'-phosphate
  modified_base 16: mod_base = OTHER; note = 2'-O-methyluridine-3'-phosphate
  modified_base 17: mod_base = OTHER; note = 2'-O-methyluridine-3'-phosphate
  modified_base 18: mod_base = OTHER; note = 2'-O-methyluridine-3'-phosphate
  modified_base 19: mod_base = OTHER; note = 2'-O-methyladenosine-3'-phosphate
  modified_base 20: mod_base = OTHER; note = 2'-O-methylguanosine-3'-phosphate
  modified_base 21: mod_base = OTHER; note = 2'-O-methyluridine-3'-phosphate ((2S,4R)-1-[29-[[2-(acetylamino)-2-deoxy-beta-D-galactopyra nosyl]oxy]-14,14-bis[[3-[[3-[[5-[[2-(acetylamino)-2-deoxy-b eta-D-galactopyranosyl]oxy]-1-oxopentyl]amino]propyl]amino] -3-oxopropoxy]methyl]-1,12,19,25-tetraoxo-16-oxa-13,20,24-t riazanonacos-1-yl]-4-hydroxy-2-pyrrolidinyl)methyl ester
tctgagtttaatcactttagt

SEQ ID NO: 5804 - RNA, 21 nt, synthetic construct
  source 1..21: mol_type = other RNA
  modified_base 1: mod_base = OTHER; note = 2'-O-methyluridine-3'-phosphorothioate
  modified_base 2: mod_base = OTHER; note = 2'-O-methyluridine-3'-phosphorothioate
  modified_base 3: mod_base = OTHER; note = 2'-O-methyladenosine-3'-phosphate
  modified_base 4: mod_base = OTHER; note = 2'-O-methylguanosine-3'-phosphate
  modified_base 5: mod_base = OTHER; note = 2'-O-methylguanosine-3'-phosphate
  modified_base 6: mod_base = OTHER; note = 2'-O-methyladenosine-3'-phosphate
  modified_base 7: mod_base = OTHER; note = 2'-deoxy-2'-fluorouridine-3'-phosphate
  modified_base 8: mod_base = OTHER; note = 2'-O-methyladenosine-3'-phosphate
  modified_base 9: mod_base = OTHER; note = 2'-deoxy-2'-fluorouridine-3'-phosphate
  modified_base 10: mod_base = OTHER; note = 2'-deoxy-2'-fluoroadenosine-3'-phosphate
  modified_base 11: mod_base = OTHER; note = 2'-deoxy-2'-fluorouridine-3'-phosphate
  modified_base 12: mod_base = OTHER; note = 2'-O-methyluridine-3'-phosphate
  modified_base 13: mod_base = OTHER; note = 2'-O-methylcytidine-3'-phosphate
  modified_base 14: mod_base = OTHER; note = 2'-O-methyladenosine-3'-phosphate
  modified_base 15: mod_base = OTHER; note = 2'-O-methylcytidine-3'-phosphate
  modified_base 16: mod_base = OTHER; note = 2'-O-methyladenosine-3'-phosphate
  modified_base 17: mod_base = OTHER; note = 2'-O-methyluridine-3'-phosphate
  modified_base 18: mod_base = OTHER; note = 2'-O-methyluridine-3'-phosphate
  modified_base 19: mod_base = OTHER; note = 2'-O-methylguanosine-3'-phosphate
  modified_base 20: mod_base = OTHER; note = 2'-O-methyluridine-3'-phosphate
  modified_base 21: mod_base = OTHER; note = 2'-O-methyluridine-3'-phosphate ((2S,4R)-1-[29-[[2-(acetylamino)-2-deoxy-beta-D-galactopyra nosyl]oxy]-14,14-bis[[3-[[3-[[5-[[2-(acetylamino)-2-deoxy-b eta-D-galactopyranosyl]oxy]-1-oxopentyl]amino]propyl]amino] -3-oxopropoxy]methyl]-1,12,19,25-tetraoxo-16-oxa-13,20,24-t riazanonacos-1-yl]-4-hydroxy-2-pyrrolidinyl)methyl ester
ttaggatatattcacattgtt

SEQ ID NO: 5805 - RNA, 21 nt, synthetic construct
  source 1..21: mol_type = other RNA
  modified_base 1: mod_base = OTHER; note = 2'-O-methyladenosine-3'-phosphorothioate
  modified_base 2: mod_base = OTHER; note = 2'-O-methyluridine-3'-phosphorothioate
  modified_base 3: mod_base = OTHER; note = 2'-O-methyluridine-3'-phosphate
  modified_base 4: mod_base = OTHER; note = 2'-O-methyluridine-3'-phosphate
  modified_base 5: mod_base = OTHER; note = 2'-O-methylguanosine-3'-phosphate
  modified_base 6: mod_base = OTHER; note = 2'-O-methylcytidine-3'-phosphate
  modified_base 7: mod_base = OTHER; note = 2'-deoxy-2'-fluorouridine-3'-phosphate
  modified_base 8: mod_base = OTHER; note = 2'-O-methylguanosine-3'-phosphate
  modified_base 9: mod_base = OTHER; note = 2'-deoxy-2'-fluoroadenosine-3'-phosphate
  modified_base 10: mod_base = OTHER; note = 2'-deoxy-2'-fluoroadenosine-3'-phosphate
  modified_base 11: mod_base = OTHER; note = 2'-deoxy-2'-fluorouridine-3'-phosphate
  modified_base 12: mod_base = OTHER; note = 2'-O-methyluridine-3'-phosphate
  modified_base 13: mod_base = OTHER; note = 2'-O-methylguanosine-3'-phosphate
  modified_base 14: mod_base = OTHER; note = 2'-O-methyladenosine-3'-phosphate
  modified_base 15: mod_base = OTHER; note = 2'-O-methyladenosine-3'-phosphate
  modified_base 16: mod_base = OTHER; note = 2'-O-methyluridine-3'-phosphate
  modified_base 17: mod_base = OTHER; note = 2'-O-methyluridine-3'-phosphate
  modified_base 18: mod_base = OTHER; note = 2'-O-methylguanosine-3'-phosphate
  modified_base 19: mod_base = OTHER; note = 2'-O-methyluridine-3'-phosphate
  modified_base 20: mod_base = OTHER; note = 2'-O-methyluridine-3'-phosphate
  modified_base 21: mod_base = OTHER; note = 2'-O-methyluridine-3'-phosphate ((2S,4R)-1-[29-[[2-(acetylamino)-2-deoxy-beta-D-galactopyra nosyl]oxy]-14,14-bis[[3-[[3-[[5-[[2-(acetylamino)-2-deoxy-b eta-D-galactopyranosyl]oxy]-1-oxopentyl]amino]propyl]amino] -3-oxopropoxy]methyl]-1,12,19,25-tetraoxo-16-oxa-13,20,24-t riazanonacos-1-yl]-4-hydroxy-2-pyrrolidinyl)methyl ester
atttgctgaattgaattgttt

SEQ ID NO: 5806 - RNA, 21 nt, synthetic construct
  source 1..21: mol_type = other RNA
  modified_base 1: mod_base = OTHER; note = 2'-O-methyluridine-3'-phosphorothioate
  modified_base 2: mod_base = OTHER; note = 2'-O-methyluridine-3'-phosphorothioate
  modified_base 3: mod_base = OTHER; note = 2'-O-methyluridine-3'-phosphate
  modified_base 4: mod_base = OTHER; note = 2'-O-methylcytidine-3'-phosphate
  modified_base 5: mod_base = OTHER; note = 2'-O-methyluridine-3'-phosphate
  modified_base 6: mod_base = OTHER; note = 2'-O-methylcytidine-3'-phosphate
  modified_base 7: mod_base = OTHER; note = 2'-deoxy-2'-fluoroadenosine-3'-phosphate
  modified_base 8: mod_base = OTHER; note = 2'-O-methyladenosine-3'-phosphate
  modified_base 9: mod_base = OTHER; note = 2'-deoxy-2'-fluoroadenosine-3'-phosphate
  modified_base 10: mod_base = OTHER; note = 2'-deoxy-2'-fluorouridine-3'-phosphate
  modified_base 11: mod_base = OTHER; note = 2'-deoxy-2'-fluorocytidine-3'-phosphate
  modified_base 12: mod_base = OTHER; note = 2'-O-methyluridine-3'-phosphate
  modified_base 13: mod_base = OTHER; note = 2'-O-methylguanosine-3'-phosphate
  modified_base 14: mod_base = OTHER; note = 2'-O-methyluridine-3'-phosphate
  modified_base 15: mod_base = OTHER; note = 2'-O-methylguanosine-3'-phosphate
  modified_base 16: mod_base = OTHER; note = 2'-O-methyladenosine-3'-phosphate
  modified_base 17: mod_base = OTHER; note = 2'-O-methyluridine-3'-phosphate
  modified_base 18: mod_base = OTHER; note = 2'-O-methylcytidine-3'-phosphate
  modified_base 19: mod_base = OTHER; note = 2'-O-methyluridine-3'-phosphate
  modified_base 20: mod_base = OTHER; note = 2'-O-methylcytidine-3'-phosphate
  modified_base 21: mod_base = OTHER; note = 2'-O-methyluridine-3'-phosphate ((2S,4R)-1-[29-[[2-(acetylamino)-2-deoxy-beta-D-galactopyra nosyl]oxy]-14,14-bis[[3-[[3-[[5-[[2-(acetylamino)-2-deoxy-b eta-D-galactopyranosyl]oxy]-1-oxopentyl]amino]propyl]amino] -3-oxopropoxy]methyl]-1,12,19,25-tetraoxo-16-oxa-13,20,24-t riazanonacos-1-yl]-4-hydroxy-2-pyrrolidinyl)methyl ester
tttctcaaatctgtgatctct

SEQ ID NO: 5807 - RNA, 21 nt, synthetic construct
  source 1..21: mol_type = other RNA
  modified_base 1: mod_base = OTHER; note = 2'-O-methyladenosine-3'-phosphorothioate
  modified_base 2: mod_base = OTHER; note = 2'-O-methyluridine-3'-phosphorothioate
  modified_base 3: mod_base = OTHER; note = 2'-O-methylcytidine-3'-phosphate
  modified_base 4: mod_base = OTHER; note = 2'-O-methyluridine-3'-phosphate
  modified_base 5: mod_base = OTHER; note = 2'-O-methylcytidine-3'-phosphate
  modified_base 6: mod_base = OTHER; note = 2'-O-methyluridine-3'-phosphate
  modified_base 7: mod_base = OTHER; note = 2'-deoxy-2'-fluorouridine-3'-phosphate
  modified_base 8: mod_base = OTHER; note = 2'-O-methyluridine-3'-phosphate
  modified_base 9: mod_base = OTHER; note = 2'-deoxy-2'-fluorouridine-3'-phosphate
  modified_base 10: mod_base = OTHER; note = 2'-deoxy-2'-fluorocytidine-3'-phosphate
  modified_base 11: mod_base = OTHER; note = 2'-deoxy-2'-fluorouridine-3'-phosphate
  modified_base 12: mod_base = OTHER; note = 2'-O-methyluridine-3'-phosphate
  modified_base 13: mod_base = OTHER; note = 2'-O-methyluridine-3'-phosphate
  modified_base 14: mod_base = OTHER; note = 2'-O-methyladenosine-3'-phosphate
  modified_base 15: mod_base = OTHER; note = 2'-O-methyluridine-3'-phosphate
  modified_base 16: mod_base = OTHER; note = 2'-O-methylcytidine-3'-phosphate
  modified_base 17: mod_base = OTHER; note = 2'-O-methylcytidine-3'-phosphate
  modified_base 18: mod_base = OTHER; note = 2'-O-methyluridine-3'-phosphate
  modified_base 19: mod_base = OTHER; note = 2'-O-methylguanosine-3'-phosphate
  modified_base 20: mod_base = OTHER; note = 2'-O-methyluridine-3'-phosphate
  modified_base 21: mod_base = OTHER; note = 2'-O-methyluridine-3'-phosphate ((2S,4R)-1-[29-[[2-(acetylamino)-2-deoxy-beta-D-galactopyra nosyl]oxy]-14,14-bis[[3-[[3-[[5-[[2-(acetylamino)-2-deoxy-b eta-D-galactopyranosyl]oxy]-1-oxopentyl]amino]propyl]amino] -3-oxopropoxy]methyl]-1,12,19,25-tetraoxo-16-oxa-13,20,24-t riazanonacos-1-yl]-4-hydroxy-2-pyrrolidinyl)methyl ester
atctcttttctttatcctgtt

SEQ ID NO: 5808 - RNA, 21 nt, synthetic construct
  source 1..21: mol_type = other RNA
  modified_base 1: mod_base = OTHER; note = 2'-O-methylcytidine-3'-phosphorothioate
  modified_base 2: mod_base = OTHER; note = 2'-O-methylcytidine-3'-phosphorothioate
  modified_base 3: mod_base = OTHER; note = 2'-O-methyluridine-3'-phosphate
  modified_base 4: mod_base = OTHER; note = 2'-O-methyluridine-3'-phosphate
  modified_base 5: mod_base = OTHER; note = 2'-O-methyluridine-3'-phosphate
  modified_base 6: mod_base = OTHER; note = 2'-O-methylcytidine-3'-phosphate
  modified_base 7: mod_base = OTHER; note = 2'-deoxy-2'-fluoroguanosine-3'-phosphate
  modified_base 8: mod_base = OTHER; note = 2'-O-methyluridine-3'-phosphate
  modified_base 9: mod_base = OTHER; note = 2'-deoxy-2'-fluorouridine-3'-phosphate
  modified_base 10: mod_base = OTHER; note = 2'-deoxy-2'-fluorouridine-3'-phosphate
  modified_base 11: mod_base = OTHER; note = 2'-deoxy-2'-fluoroguanosine-3'-phosphate
  modified_base 12: mod_base = OTHER; note = 2'-O-methylcytidine-3'-phosphate
  modified_base 13: mod_base = OTHER; note = 2'-O-methyluridine-3'-phosphate
  modified_base 14: mod_base = OTHER; note = 2'-O-methyluridine-3'-phosphate
  modified_base 15: mod_base = OTHER; note = 2'-O-methyluridine-3'-phosphate
  modified_base 16: mod_base = OTHER; note = 2'-O-methylcytidine-3'-phosphate
  modified_base 17: mod_base = OTHER; note = 2'-O-methyluridine-3'-phosphate
  modified_base 18: mod_base = OTHER; note = 2'-O-methyluridine-3'-phosphate
  modified_base 19: mod_base = OTHER; note = 2'-O-methyladenosine-3'-phosphate
  modified_base 20: mod_base = OTHER; note = 2'-O-methyluridine-3'-phosphate
  modified_base 21: mod_base = OTHER; note = 2'-O-methyluridine-3'-phosphate ((2S,4R)-1-[29-[[2-(acetylamino)-2-deoxy-beta-D-galactopyra nosyl]oxy]-14,14-bis[[3-[[3-[[5-[[2-(acetylamino)-2-deoxy-b eta-D-galactopyranosyl]oxy]-1-oxopentyl]amino]propyl]amino] -3-oxopropoxy]methyl]-1,12,19,25-tetraoxo-16-oxa-13,20,24-t riazanonacos-1-yl]-4-hydroxy-2-pyrrolidinyl)methyl ester
cctttcgtttgctttcttatt

SEQ ID NO: 5809 - RNA, 21 nt, synthetic construct
  source 1..21: mol_type = other RNA
  modified_base 1: mod_base = OTHER; note = 2'-O-methyluridine-3'-phosphorothioate
  modified_base 2: mod_base = OTHER; note = 2'-O-methyluridine-3'-phosphorothioate
  modified_base 3: mod_base = OTHER; note = 2'-O-methyluridine-3'-phosphate
  modified_base 4: mod_base = OTHER; note = 2'-O-methylguanosine-3'-phosphate
  modified_base 5: mod_base = OTHER; note = 2'-O-methyluridine-3'-phosphate
  modified_base 6: mod_base = OTHER; note = 2'-O-methyluridine-3'-phosphate
  modified_base 7: mod_base = OTHER; note = 2'-deoxy-2'-fluorocytidine-3'-phosphate
  modified_base 8: mod_base = OTHER; note = 2'-O-methylcytidine-3'-phosphate
  modified_base 9: mod_base = OTHER; note = 2'-deoxy-2'-fluoroadenosine-3'-phosphate
  modified_base 10: mod_base = OTHER; note = 2'-deoxy-2'-fluorouridine-3'-phosphate
  modified_base 11: mod_base = OTHER; note = 2'-deoxy-2'-fluorouridine-3'-phosphate
  modified_base 12: mod_base = OTHER; note = 2'-O-methylcytidine-3'-phosphate
  modified_base 13: mod_base = OTHER; note = 2'-O-methyluridine-3'-phosphate
  modified_base 14: mod_base = OTHER; note = 2'-O-methyluridine-3'-phosphate
  modified_base 15: mod_base = OTHER; note = 2'-O-methyluridine-3'-phosphate
  modified_base 16: mod_base = OTHER; note = 2'-O-methyluridine-3'-phosphate
  modified_base 17: mod_base = OTHER; note = 2'-O-methylcytidine-3'-phosphate
  modified_base 18: mod_base = OTHER; note = 2'-O-methyluridine-3'-phosphate
  modified_base 19: mod_base = OTHER; note = 2'-O-methyluridine-3'-phosphate
  modified_base 20: mod_base = OTHER; note = 2'-O-methyladenosine-3'-phosphate
  modified_base 21: mod_base = OTHER; note = 2'-O-methyluridine-3'-phosphate ((2S,4R)-1-[29-[[2-(acetylamino)-2-deoxy-beta-D-galactopyra nosyl]oxy]-14,14-bis[[3-[[3-[[5-[[2-(acetylamino)-2-deoxy-b eta-D-galactopyranosyl]oxy]-1-oxopentyl]amino]propyl]amino] -3-oxopropoxy]methyl]-1,12,19,25-tetraoxo-16-oxa-13,20,24-t riazanonacos-1-yl]-4-hydroxy-2-pyrrolidinyl)methyl ester
tttgttccattcttttcttat

SEQ ID NO: 5810 - RNA, 21 nt, synthetic construct
  source 1..21: mol_type = other RNA
  modified_base 1: mod_base = OTHER; note = 2'-O-methylcytidine-3'-phosphorothioate
  modified_base 2: mod_base = OTHER; note = 2'-O-methyluridine-3'-phosphorothioate
  modified_base 3: mod_base = OTHER; note = 2'-O-methylguanosine-3'-phosphate
  modified_base 4: mod_base = OTHER; note = 2'-O-methylguanosine-3'-phosphate
  modified_base 5: mod_base = OTHER; note = 2'-O-methylcytidine-3'-phosphate
  modified_base 6: mod_base = OTHER; note = 2'-O-methyluridine-3'-phosphate
  modified_base 7: mod_base = OTHER; note = 2'-deoxy-2'-fluoroadenosine-3'-phosphate
  modified_base 8: mod_base = OTHER; note = 2'-O-methylguanosine-3'-phosphate
  modified_base 9: mod_base = OTHER; note = 2'-deoxy-2'-fluorouridine-3'-phosphate
  modified_base 10: mod_base = OTHER; note = 2'-deoxy-2'-fluoroadenosine-3'-phosphate
  modified_base 11: mod_base = OTHER; note = 2'-deoxy-2'-fluoroguanosine-3'-phosphate
  modified_base 12: mod_base = OTHER; note = 2'-O-methyluridine-3'-phosphate
  modified_base 13: mod_base = OTHER; note = 2'-O-methylguanosine-3'-phosphate
  modified_base 14: mod_base = OTHER; note = 2'-O-methyluridine-3'-phosphate
  modified_base 15: mod_base = OTHER; note = 2'-O-methylguanosine-3'-phosphate
  modified_base 16: mod_base = OTHER; note = 2'-O-methyluridine-3'-phosphate
  modified_base 17: mod_base = OTHER; note = 2'-O-methylguanosine-3'-phosphate
  modified_base 18: mod_base = OTHER; note = 2'-O-methyladenosine-3'-phosphate
  modified_base 19: mod_base = OTHER; note = 2'-O-methylguanosine-3'-phosphate
  modified_base 20: mod_base = OTHER; note = 2'-O-methyladenosine-3'-phosphate
  modified_base 21: mod_base = OTHER; note = 2'-O-methyluridine-3'-phosphate ((2S,4R)-1-[29-[[2-(acetylamino)-2-deoxy-beta-D-galactopyra nosyl]oxy]-14,14-bis[[3-[[3-[[5-[[2-(acetylamino)-2-deoxy-b eta-D-galactopyranosyl]oxy]-1-oxopentyl]amino]propyl]amino] -3-oxopropoxy]methyl]-1,12,19,25-tetraoxo-16-oxa-13,20,24-t riazanonacos-1-yl]-4-hydroxy-2-pyrrolidinyl)methyl ester
ctggctagtagtgtgtgagat

SEQ ID NO: 5811 - RNA, 21 nt, synthetic construct
  source 1..21: mol_type = other RNA
  modified_base 1: mod_base = OTHER; note = 2'-O-methyladenosine-3'-phosphorothioate
  modified_base 2: mod_base = OTHER; note = 2'-O-methylguanosine-3'-phosphorothioate
  modified_base 3: mod_base = OTHER; note = 2'-O-methyluridine-3'-phosphate
  modified_base 4: mod_base = OTHER; note = 2'-O-methylguanosine-3'-phosphate
  modified_base 5: mod_base = OTHER; note = 2'-O-methyladenosine-3'-phosphate
  modified_base 6: mod_base = OTHER; note = 2'-O-methyladenosine-3'-phosphate
  modified_base 7: mod_base = OTHER; note = 2'-deoxy-2'-fluoroadenosine-3'-phosphate
  modified_base 8: mod_base = OTHER; note = 2'-O-methyluridine-3'-phosphate
  modified_base 9: mod_base = OTHER; note = 2'-deoxy-2'-fluorouridine-3'-phosphate
  modified_base 10: mod_base = OTHER; note = 2'-deoxy-2'-fluorouridine-3'-phosphate
  modified_base 11: mod_base = OTHER; note = 2'-deoxy-2'-fluoroguanosine-3'-phosphate
  modified_base 12: mod_base = OTHER; note = 2'-O-methylcytidine-3'-phosphate
  modified_base 13: mod_base = OTHER; note = 2'-O-methyladenosine-3'-phosphate
  modified_base 14: mod_base = OTHER; note = 2'-O-methyluridine-3'-phosphate
  modified_base 15: mod_base = OTHER; note = 2'-O-methyladenosine-3'-phosphate
  modified_base 16: mod_base = OTHER; note = 2'-O-methyladenosine-3'-phosphate
  modified_base 17: mod_base = OTHER; note = 2'-O-methyluridine-3'-phosphate
  modified_base 18: mod_base = OTHER; note = 2'-O-methylguanosine-3'-phosphate
  modified_base 19: mod_base = OTHER; note = 2'-O-methyladenosine-3'-phosphate
  modified_base 20: mod_base = OTHER; note = 2'-O-methyladenosine-3'-phosphate
  modified_base 21: mod_base = OTHER; note = 2'-O-methyluridine-3'-phosphate ((2S,4R)-1-[29-[[2-(acetylamino)-2-deoxy-beta-D-galactopyra nosyl]oxy]-14,14-bis[[3-[[3-[[5-[[2-(acetylamino)-2-deoxy-b eta-D-galactopyranosyl]oxy]-1-oxopentyl]amino]propyl]amino] -3-oxopropoxy]methyl]-1,12,19,25-tetraoxo-16-oxa-13,20,24-t riazanonacos-1-yl]-4-hydroxy-2-pyrrolidinyl)methyl ester
agtgaaatttgcataatgaat

SEQ ID NO: 5812 - RNA, 21 nt, synthetic construct
  source 1..21: mol_type = other RNA
  modified_base 1: mod_base = OTHER; note = 2'-O-methyladenosine-3'-phosphorothioate
  modified_base 2: mod_base = OTHER; note = 2'-O-methylguanosine-3'-phosphorothioate
  modified_base 3: mod_base = OTHER; note = 2'-O-methylguanosine-3'-phosphate
  modified_base 4: mod_base = OTHER; note = 2'-O-methylguanosine-3'-phosphate
  modified_base 5: mod_base = OTHER; note = 2'-O-methyladenosine-3'-phosphate
  modified_base 6: mod_base = OTHER; note = 2'-O-methyladenosine-3'-phosphate
  modified_base 7: mod_base = OTHER; note = 2'-deoxy-2'-fluoroadenosine-3'-phosphate
  modified_base 8: mod_base = OTHER; note = 2'-O-methyluridine-3'-phosphate
  modified_base 9: mod_base = OTHER; note = 2'-deoxy-2'-fluoroadenosine-3'-phosphate
  modified_base 10: mod_base = OTHER; note = 2'-deoxy-2'-fluoroadenosine-3'-phosphate
  modified_base 11: mod_base = OTHER; note = 2'-deoxy-2'-fluoroadenosine-3'-phosphate
  modified_base 12: mod_base = OTHER; note = 2'-O-methyladenosine-3'-phosphate
  modified_base 13: mod_base = OTHER; note = 2'-O-methylguanosine-3'-phosphate
  modified_base 14: mod_base = OTHER; note = 2'-O-methyluridine-3'-phosphate
  modified_base 15: mod_base = OTHER; note = 2'-O-methylcytidine-3'-phosphate
  modified_base 16: mod_base = OTHER; note = 2'-O-methyluridine-3'-phosphate
  modified_base 17: mod_base = OTHER; note = 2'-O-methyluridine-3'-phosphate
  modified_base 18: mod_base = OTHER; note = 2'-O-methyluridine-3'-phosphate
  modified_base 19: mod_base = OTHER; note = 2'-O-methyluridine-3'-phosphate
  modified_base 20: mod_base = OTHER; note = 2'-O-methylguanosine-3'-phosphate
  modified_base 21: mod_base = OTHER; note = 2'-O-methyluridine-3'-phosphate ((2S,4R)-1-[29-[[2-(acetylamino)-2-deoxy-beta-D-galactopyra nosyl]oxy]-14,14-bis[[3-[[3-[[5-[[2-(acetylamino)-2-deoxy-b eta-D-galactopyranosyl]oxy]-1-oxopentyl]amino]propyl]amino] -3-oxopropoxy]methyl]-1,12,19,25-tetraoxo-16-oxa-13,20,24-t riazanonacos-1-yl]-4-hydroxy-2-pyrrolidinyl)methyl ester
agggaaataaaagtcttttgt

SEQ ID NO: 5813 - RNA, 21 nt, synthetic construct
  source 1..21: mol_type = other RNA
  modified_base 1: mod_base = OTHER; note = 2'-O-methyluridine-3'-phosphorothioate
  modified_base 2: mod_base = OTHER; note = 2'-O-methyladenosine-3'-phosphorothioate
  modified_base 3: mod_base = OTHER; note = 2'-O-methylguanosine-3'-phosphate
  modified_base 4: mod_base = OTHER; note = 2'-O-methylcytidine-3'-phosphate
  modified_base 5: mod_base = OTHER; note = 2'-O-methyladenosine-3'-phosphate
  modified_base 6: mod_base = OTHER; note = 2'-O-methylcytidine-3'-phosphate
  modified_base 7: mod_base = OTHER; note = 2'-deoxy-2'-fluorouridine-3'-phosphate
  modified_base 8: mod_base = OTHER; note = 2'-O-methyluridine-3'-phosphate
  modified_base 9: mod_base = OTHER; note = 2'-deoxy-2'-fluorouridine-3'-phosphate
  modified_base 10: mod_base = OTHER; note = 2'-deoxy-2'-fluorouridine-3'-phosphate
  modified_base 11: mod_base = OTHER; note = 2'-deoxy-2'-fluoroguanosine-3'-phosphate
  modified_base 12: mod_base = OTHER; note = 2'-O-methyladenosine-3'-phosphate
  modified_base 13: mod_base = OTHER; note = 2'-O-methyluridine-3'-phosphate
  modified_base 14: mod_base = OTHER; note = 2'-O-methylcytidine-3'-phosphate
  modified_base 15: mod_base = OTHER; note = 2'-O-methyladenosine-3'-phosphate
  modified_base 16: mod_base = OTHER; note = 2'-O-methyluridine-3'-phosphate
  modified_base 17: mod_base = OTHER; note = 2'-O-methylcytidine-3'-phosphate
  modified_base 18: mod_base = OTHER; note = 2'-O-methyluridine-3'-phosphate
  modified_base 19: mod_base = OTHER; note = 2'-O-methyluridine-3'-phosphate
  modified_base 20: mod_base = OTHER; note = 2'-O-methylcytidine-3'-phosphate
  modified_base 21: mod_base = OTHER; note = 2'-O-methyluridine-3'-phosphate ((2S,4R)-1-[29-[[2-(acetylamino)-2-deoxy-beta-D-galactopyra nosyl]oxy]-14,14-bis[[3-[[3-[[5-[[2-(acetylamino)-2-deoxy-b eta-D-galactopyranosyl]oxy]-1-oxopentyl]amino]propyl]amino] -3-oxopropoxy]methyl]-1,12,19,25-tetraoxo-16-oxa-13,20,24-t riazanonacos-1-yl]-4-hydroxy-2-pyrrolidinyl)methyl ester
tagcacttttgatcatcttct

SEQ ID NO: 5814 - RNA, 21 nt, synthetic construct
  source 1..21: mol_type = other RNA
  modified_base 1: mod_base = OTHER; note = 2'-O-methyluridine-3'-phosphorothioate
  modified_base 2: mod_base = OTHER; note = 2'-O-methyluridine-3'-phosphorothioate
  modified_base 3: mod_base = OTHER; note = 2'-O-methylguanosine-3'-phosphate
  modified_base 4: mod_base = OTHER; note = 2'-O-methyluridine-3'-phosphate
  modified_base 5: mod_base = OTHER; note = 2'-O-methylcytidine-3'-phosphate
  modified_base 6: mod_base = OTHER; note = 2'-O-methyladenosine-3'-phosphate
  modified_base 7: mod_base = OTHER; note = 2'-deoxy-2'-fluoroadenosine-3'-phosphate
  modified_base 8: mod_base = OTHER; note = 2'-O-methylguanosine-3'-phosphate
  modified_base 9: mod_base = OTHER; note = 2'-deoxy-2'-fluoroadenosine-3'-phosphate
  modified_base 10: mod_base = OTHER; note = 2'-deoxy-2'-fluorouridine-3'-phosphate
  modified_base 11: mod_base = OTHER; note = 2'-deoxy-2'-fluorouridine-3'-phosphate
  modified_base 12: mod_base = OTHER; note = 2'-O-methyluridine-3'-phosphate
  modified_base 13: mod_base = OTHER; note = 2'-O-methyluridine-3'-phosphate
  modified_base 14: mod_base = OTHER; note = 2'-O-methyladenosine-3'-phosphate
  modified_base 15: mod_base = OTHER; note = 2'-O-methyladenosine-3'-phosphate
  modified_base 16: mod_base = OTHER; note = 2'-O-methyladenosine-3'-phosphate
  modified_base 17: mod_base = OTHER; note = 2'-O-methylguanosine-3'-phosphate
  modified_base 18: mod_base = OTHER; note = 2'-O-methylguanosine-3'-phosphate
  modified_base 19: mod_base = OTHER; note = 2'-O-methyluridine-3'-phosphate
  modified_base 20: mod_base = OTHER; note = 2'-O-methyluridine-3'-phosphate
  modified_base 21: mod_base = OTHER; note = 2'-O-methyluridine-3'-phosphate ((2S,4R)-1-[29-[[2-(acetylamino)-2-deoxy-beta-D-galactopyra nosyl]oxy]-14,14-bis[[3-[[3-[[5-[[2-(acetylamino)-2-deoxy-b eta-D-galactopyranosyl]oxy]-1-oxopentyl]amino]propyl]amino] -3-oxopropoxy]methyl]-1,12,19,25-tetraoxo-16-oxa-13,20,24-t riazanonacos-1-yl]-4-hydroxy-2-pyrrolidinyl)methyl ester
ttgtcaagattttaaaggttt

SEQ ID NO: 5815 - RNA, 21 nt, synthetic construct
  source 1..21: mol_type = other RNA
  modified_base 1: mod_base = OTHER; note = 2'-O-methylguanosine-3'-phosphorothioate
  modified_base 2: mod_base = OTHER; note = 2'-O-methylguanosine-3'-phosphorothioate
  modified_base 3: mod_base = OTHER; note = 2'-O-methyluridine-3'-phosphate
  modified_base 4: mod_base = OTHER; note = 2'-O-methyluridine-3'-phosphate
  modified_base 5: mod_base = OTHER; note = 2'-O-methyluridine-3'-phosphate
  modified_base 6: mod_base = OTHER; note = 2'-O-methyladenosine-3'-phosphate
  modified_base 7: mod_base = OTHER; note = 2'-deoxy-2'-fluorouridine-3'-phosphate
  modified_base 8: mod_base = OTHER; note = 2'-O-methyladenosine-3'-phosphate
  modified_base 9: mod_base = OTHER; note = 2'-deoxy-2'-fluoroadenosine-3'-phosphate
  modified_base 10: mod_base = OTHER; note = 2'-deoxy-2'-fluorouridine-3'-phosphate
  modified_base 11: mod_base = OTHER; note = 2'-deoxy-2'-fluorouridine-3'-phosphate
  modified_base 12: mod_base = OTHER; note = 2'-O-methylcytidine-3'-phosphate
  modified_base 13: mod_base = OTHER; note = 2'-O-methyluridine-3'-phosphate
  modified_base 14: mod_base = OTHER; note = 2'-O-methylguanosine-3'-phosphate
  modified_base 15: mod_base = OTHER; note = 2'-O-methylcytidine-3'-phosphate
  modified_base 16: mod_base = OTHER; note = 2'-O-methyluridine-3'-phosphate
  modified_base 17: mod_base = OTHER; note = 2'-O-methyluridine-3'-phosphate
  modified_base 18: mod_base = OTHER; note = 2'-O-methyladenosine-3'-phosphate
  modified_base 19: mod_base = OTHER; note = 2'-O-methyladenosine-3'-phosphate
  modified_base 20: mod_base = OTHER; note = 2'-O-methylguanosine-3'-phosphate
  modified_base 21: mod_base = OTHER; note = 2'-O-methyluridine-3'-phosphate ((2S,4R)-1-[29-[[2-(acetylamino)-2-deoxy-beta-D-galactopyra nosyl]oxy]-14,14-bis[[3-[[3-[[5-[[2-(acetylamino)-2-deoxy-b eta-D-galactopyranosyl]oxy]-1-oxopentyl]amino]propyl]amino] -3-oxopropoxy]methyl]-1,12,19,25-tetraoxo-16-oxa-13,20,24-t riazanonacos-1-yl]-4-hydroxy-2-pyrrolidinyl)methyl ester
ggtttataattctgcttaagt

SEQ ID NO: 5816 - RNA, 21 nt, synthetic construct
  source 1..21: mol_type = other RNA
  modified_base 1: mod_base = OTHER; note = 2'-O-methyluridine-3'-phosphorothioate
  modified_base 2: mod_base = OTHER; note = 2'-O-methyladenosine-3'-phosphorothioate
  modified_base 3: mod_base = OTHER; note = 2'-O-methyladenosine-3'-phosphate
  modified_base 4: mod_base = OTHER; note = 2'-O-methylguanosine-3'-phosphate
  modified_base 5: mod_base = OTHER; note = 2'-O-methylcytidine-3'-phosphate
  modified_base 6: mod_base = OTHER; note = 2'-O-methyluridine-3'-phosphate
  modified_base 7: mod_base = OTHER; note = 2'-deoxy-2'-fluorocytidine-3'-phosphate
  modified_base 8: mod_base = OTHER; note = 2'-O-methyluridine-3'-phosphate
  modified_base 9: mod_base = OTHER; note = 2'-deoxy-2'-fluoroadenosine-3'-phosphate
  modified_base 10: mod_base = OTHER; note = 2'-deoxy-2'-fluoroguanosine-3'-phosphate
  modified_base 11: mod_base = OTHER; note = 2'-deoxy-2'-fluorouridine-3'-phosphate
  modified_base 12: mod_base = OTHER; note = 2'-O-methyluridine-3'-phosphate
  modified_base 13: mod_base = OTHER; note = 2'-O-methyluridine-3'-phosphate
  modified_base 14: mod_base = OTHER; note = 2'-O-methylguanosine-3'-phosphate
  modified_base 15: mod_base = OTHER; note = 2'-O-methylguanosine-3'-phosphate
  modified_base 16: mod_base = OTHER; note = 2'-O-methyladenosine-3'-phosphate
  modified_base 17: mod_base = OTHER; note = 2'-O-methylcytidine-3'-phosphate
  modified_base 18: mod_base = OTHER; note = 2'-O-methyluridine-3'-phosphate
  modified_base 19: mod_base = OTHER; note = 2'-O-methyluridine-3'-phosphate
  modified_base 20: mod_base = OTHER; note = 2'-O-methyladenosine-3'-phosphate
  modified_base 21: mod_base = OTHER; note = 2'-O-methyluridine-3'-phosphate ((2S,4R)-1-[29-[[2-(acetylamino)-2-deoxy-beta-D-galactopyra nosyl]oxy]-14,14-bis[[3-[[3-[[5-[[2-(acetylamino)-2-deoxy-b eta-D-galactopyranosyl]oxy]-1-oxopentyl]amino]propyl]amino] -3-oxopropoxy]methyl]-1,12,19,25-tetraoxo-16-oxa-13,20,24-t riazanonacos-1-yl]-4-hydroxy-2-pyrrolidinyl)methyl ester
taagctctagtttggacttat

SEQ ID NO: 5817 - RNA, 21 nt, synthetic construct
  source 1..21: mol_type = other RNA
  modified_base 1: mod_base = OTHER; note = 2'-O-methyladenosine-3'-phosphorothioate
  modified_base 2: mod_base = OTHER; note = 2'-O-methylcytidine-3'-phosphorothioate
  modified_base 3: mod_base = OTHER; note = 2'-O-methyluridine-3'-phosphate
  modified_base 4: mod_base = OTHER; note = 2'-O-methyluridine-3'-phosphate
  modified_base 5: mod_base = OTHER; note = 2'-O-methyladenosine-3'-phosphate
  modified_base 6: mod_base = OTHER; note = 2'-O-methylguanosine-3'-phosphate
  modified_base 7: mod_base = OTHER; note = 2'-deoxy-2'-fluoroguanosine-3'-phosphate
  modified_base 8: mod_base = OTHER; note = 2'-O-methyluridine-3'-phosphate
  modified_base 9: mod_base = OTHER; note = 2'-deoxy-2'-fluoroadenosine-3'-phosphate
  modified_base 10: mod_base = OTHER; note = 2'-deoxy-2'-fluorouridine-3'-phosphate
  modified_base 11: mod_base = OTHER; note = 2'-deoxy-2'-fluorocytidine-3'-phosphate
  modified_base 12: mod_base = OTHER; note = 2'-O-methylcytidine-3'-phosphate
  modified_base 13: mod_base = OTHER; note = 2'-O-methyluridine-3'-phosphate
  modified_base 14: mod_base = OTHER; note = 2'-O-methyladenosine-3'-phosphate
  modified_base 15: mod_base = OTHER; note = 2'-O-methyladenosine-3'-phosphate
  modified_base 16: mod_base = OTHER; note = 2'-O-methylcytidine-3'-phosphate
  modified_base 17: mod_base = OTHER; note = 2'-O-methyluridine-3'-phosphate
  modified_base 18: mod_base = OTHER; note = 2'-O-methyladenosine-3'-phosphate
  modified_base 19: mod_base = OTHER; note = 2'-O-methyluridine-3'-phosphate
  modified_base 20: mod_base = OTHER; note = 2'-O-methylguanosine-3'-phosphate
  modified_base 21: mod_base = OTHER; note = 2'-O-methyluridine-3'-phosphate ((2S,4R)-1-[29-[[2-(acetylamino)-2-deoxy-beta-D-galactopyra nosyl]oxy]-14,14-bis[[3-[[3-[[5-[[2-(acetylamino)-2-deoxy-b eta-D-galactopyranosyl]oxy]-1-oxopentyl]amino]propyl]amino] -3-oxopropoxy]methyl]-1,12,19,25-tetraoxo-16-oxa-13,20,24-t riazanonacos-1-yl]-4-hydroxy-2-pyrrolidinyl)methyl ester
acttaggtatcctaactatgt

SEQ ID NO: 5818 - RNA, 21 nt, synthetic construct
  source 1..21: mol_type = other RNA
  modified_base 1: mod_base = OTHER; note = 2'-O-methyladenosine-3'-phosphorothioate
  modified_base 2: mod_base = OTHER; note = 2'-O-methylguanosine-3'-phosphorothioate
  modified_base 3: mod_base = OTHER; note = 2'-O-methylguanosine-3'-phosphate
  modified_base 4: mod_base = OTHER; note = 2'-O-methyluridine-3'-phosphate
  modified_base 5: mod_base = OTHER; note = 2'-O-methyladenosine-3'-phosphate
  modified_base 6: mod_base = OTHER; note = 2'-O-methyluridine-3'-phosphate
  modified_base 7: mod_base = OTHER; note = 2'-deoxy-2'-fluorouridine-3'-phosphate
  modified_base 8: mod_base = OTHER; note = 2'-O-methyluridine-3'-phosphate
  modified_base 9: mod_base = OTHER; note = 2'-deoxy-2'-fluoroguanosine-3'-phosphate
  modified_base 10: mod_base = OTHER; note = 2'-deoxy-2'-fluorocytidine-3'-phosphate
  modified_base 11: mod_base = OTHER; note = 2'-deoxy-2'-fluoroadenosine-3'-phosphate
  modified_base 12: mod_base = OTHER; note = 2'-O-methyluridine-3'-phosphate
  modified_base 13: mod_base = OTHER; note = 2'-O-methyluridine-3'-phosphate
  modified_base 14: mod_base = OTHER; note = 2'-O-methylguanosine-3'-phosphate
  modified_base 15: mod_base = OTHER; note = 2'-O-methyluridine-3'-phosphate
  modified_base 16: mod_base = OTHER; note = 2'-O-methyluridine-3'-phosphate
  modified_base 17: mod_base = OTHER; note = 2'-O-methyluridine-3'-phosphate
  modified_base 18: mod_base = OTHER; note = 2'-O-methyladenosine-3'-phosphate
  modified_base 19: mod_base = OTHER; note = 2'-O-methyladenosine-3'-phosphate
  modified_base 20: mod_base = OTHER; note = 2'-O-methyladenosine-3'-phosphate
  modified_base 21: mod_base = OTHER; note = 2'-O-methyluridine-3'-phosphate ((2S,4R)-1-[29-[[2-(acetylamino)-2-deoxy-beta-D-galactopyra nosyl]oxy]-14,14-bis[[3-[[3-[[5-[[2-(acetylamino)-2-deoxy-b eta-D-galactopyranosyl]oxy]-1-oxopentyl]amino]propyl]amino] -3-oxopropoxy]methyl]-1,12,19,25-tetraoxo-16-oxa-13,20,24-t riazanonacos-1-yl]-4-hydroxy-2-pyrrolidinyl)methyl ester
aggtatttgcattgtttaaat

SEQ ID NO: 5819 - RNA, 21 nt, synthetic construct
  source 1..21: mol_type = other RNA
  modified_base 1: mod_base = OTHER; note = 2'-O-methyladenosine-3'-phosphorothioate
  modified_base 2: mod_base = OTHER; note = 2'-O-methylguanosine-3'-phosphorothioate
  modified_base 3: mod_base = OTHER; note = 2'-O-methylguanosine-3'-phosphate
  modified_base 4: mod_base = OTHER; note = 2'-O-methyladenosine-3'-phosphate
  modified_base 5: mod_base = OTHER; note = 2'-O-methyluridine-3'-phosphate
  modified_base 6: mod_base = OTHER; note = 2'-O-methyladenosine-3'-phosphate
  modified_base 7: mod_base = OTHER; note = 2'-deoxy-2'-fluoroadenosine-3'-phosphate
  modified_base 8: mod_base = OTHER; note = 2'-O-methyladenosine-3'-phosphate
  modified_base 9: mod_base = OTHER; note = 2'-deoxy-2'-fluoroadenosine-3'-phosphate
  modified_base 10: mod_base = OTHER; note = 2'-deoxy-2'-fluoroguanosine-3'-phosphate
  modified_base 11: mod_base = OTHER; note = 2'-deoxy-2'-fluorocytidine-3'-phosphate
  modified_base 12: mod_base = OTHER; note = 2'-O-methyladenosine-3'-phosphate
  modified_base 13: mod_base = OTHER; note = 2'-O-methyladenosine-3'-phosphate
  modified_base 14: mod_base = OTHER; note = 2'-O-methylguanosine-3'-phosphate
  modified_base 15: mod_base = OTHER; note = 2'-O-methyluridine-3'-phosphate
  modified_base 16: mod_base = OTHER; note = 2'-O-methyluridine-3'-phosphate
  modified_base 17: mod_base = OTHER; note = 2'-O-methylcytidine-3'-phosphate
  modified_base 18: mod_base = OTHER; note = 2'-O-methylcytidine-3'-phosphate
  modified_base 19: mod_base = OTHER; note = 2'-O-methyluridine-3'-phosphate
  modified_base 20: mod_base = OTHER; note = 2'-O-methylcytidine-3'-phosphate
  modified_base 21: mod_base = OTHER; note = 2'-O-methyluridine-3'-phosphate ((2S,4R)-1-[29-[[2-(acetylamino)-2-deoxy-beta-D-galactopyra nosyl]oxy]-14,14-bis[[3-[[3-[[5-[[2-(acetylamino)-2-deoxy-b eta-D-galactopyranosyl]oxy]-1-oxopentyl]amino]propyl]amino] -3-oxopropoxy]methyl]-1,12,19,25-tetraoxo-16-oxa-13,20,24-t riazanonacos-1-yl]-4-hydroxy-2-pyrrolidinyl)methyl ester
aggataaaagcaagttcctct

SEQ ID NO: 5820 - RNA, 21 nt, synthetic construct
  source 1..21: mol_type = other RNA
  modified_base 1: mod_base = OTHER; note = 2'-O-methylcytidine-3'-phosphorothioate
  modified_base 2: mod_base = OTHER; note = 2'-O-methyluridine-3'-phosphorothioate
  modified_base 3: mod_base = OTHER; note = 2'-O-methylguanosine-3'-phosphate
  modified_base 4: mod_base = OTHER; note = 2'-O-methyluridine-3'-phosphate
  modified_base 5: mod_base = OTHER; note = 2'-O-methylguanosine-3'-phosphate
  modified_base 6: mod_base = OTHER; note = 2'-O-methyladenosine-3'-phosphate
  modified_base 7: mod_base = OTHER; note = 2'-deoxy-2'-fluorocytidine-3'-phosphate
  modified_base 8: mod_base = OTHER; note = 2'-O-methyluridine-3'-phosphate
  modified_base 9: mod_base = OTHER; note = 2'-deoxy-2'-fluoroguanosine-3'-phosphate
  modified_base 10: mod_base = OTHER; note = 2'-deoxy-2'-fluorocytidine-3'-phosphate
  modified_base 11: mod_base = OTHER; note = 2'-deoxy-2'-fluoroadenosine-3'-phosphate
  modified_base 12: mod_base = OTHER; note = 2'-O-methyladenosine-3'-phosphate
  modified_base 13: mod_base = OTHER; note = 2'-O-methylcytidine-3'-phosphate
  modified_base 14: mod_base = OTHER; note = 2'-O-methylguanosine-3'-phosphate
  modified_base 15: mod_base = OTHER; note = 2'-O-methyluridine-3'-phosphate
  modified_base 16: mod_base = OTHER; note = 2'-O-methylcytidine-3'-phosphate
  modified_base 17: mod_base = OTHER; note = 2'-O-methyluridine-3'-phosphate
  modified_base 18: mod_base = OTHER; note = 2'-O-methyluridine-3'-phosphate
  modified_base 19: mod_base = OTHER; note = 2'-O-methyladenosine-3'-phosphate
  modified_base 20: mod_base = OTHER; note = 2'-O-methylcytidine-3'-phosphate
  modified_base 21: mod_base = OTHER; note = 2'-O-methyluridine-3'-phosphate ((2S,4R)-1-[29-[[2-(acetylamino)-2-deoxy-beta-D-galactopyra nosyl]oxy]-14,14-bis[[3-[[3-[[5-[[2-(acetylamino)-2-deoxy-b eta-D-galactopyranosyl]oxy]-1-oxopentyl]amino]propyl]amino] -3-oxopropoxy]methyl]-1,12,19,25-tetraoxo-16-oxa-13,20,24-t riazanonacos-1-yl]-4-hydroxy-2-pyrrolidinyl)methyl ester
ctgtgactgcaacgtcttact

SEQ ID NO: 5821 - RNA, 21 nt, synthetic construct
  source 1..21: mol_type = other RNA
  modified_base 1: mod_base = OTHER; note = 2'-O-methylcytidine-3'-phosphorothioate
  modified_base 2: mod_base = OTHER; note = 2'-O-methyladenosine-3'-phosphorothioate
  modified_base 3: mod_base = OTHER; note = 2'-O-methylguanosine-3'-phosphate
  modified_base 4: mod_base = OTHER; note = 2'-O-methylguanosine-3'-phosphate
  modified_base 5: mod_base = OTHER; note = 2'-O-methyladenosine-3'-phosphate
  modified_base 6: mod_base = OTHER; note = 2'-O-methylguanosine-3'-phosphate
  modified_base 7: mod_base = OTHER; note = 2'-deoxy-2'-fluoroguanosine-3'-phosphate
  modified_base 8: mod_base = OTHER; note = 2'-O-methyladenosine-3'-phosphate
  modified_base 9: mod_base = OTHER; note = 2'-deoxy-2'-fluorouridine-3'-phosphate
  modified_base 10: mod_base = OTHER; note = 2'-deoxy-2'-fluoroadenosine-3'-phosphate
  modified_base 11: mod_base = OTHER; note = 2'-deoxy-2'-fluorocytidine-3'-phosphate
  modified_base 12: mod_base = OTHER; note = 2'-O-methylcytidine-3'-phosphate
  modified_base 13: mod_base = OTHER; note = 2'-O-methyladenosine-3'-phosphate
  modified_base 14: mod_base = OTHER; note = 2'-O-methyladenosine-3'-phosphate
  modified_base 15: mod_base = OTHER; note = 2'-O-methylcytidine-3'-phosphate
  modified_base 16: mod_base = OTHER; note = 2'-O-methyluridine-3'-phosphate
  modified_base 17: mod_base = OTHER; note = 2'-O-methyluridine-3'-phosphate
  modified_base 18: mod_base = OTHER; note = 2'-O-methylguanosine-3'-phosphate
  modified_base 19: mod_base = OTHER; note = 2'-O-methyladenosine-3'-phosphate
  modified_base 20: mod_base = OTHER; note = 2'-O-methyluridine-3'-phosphate
  modified_base 21: mod_base = OTHER; note = 2'-O-methyluridine-3'-phosphate ((2S,4R)-1-[29-[[2-(acetylamino)-2-deoxy-beta-D-galactopyra nosyl]oxy]-14,14-bis[[3-[[3-[[5-[[2-(acetylamino)-2-deoxy-b eta-D-galactopyranosyl]oxy]-1-oxopentyl]amino]propyl]amino] -3-oxopropoxy]methyl]-1,12,19,25-tetraoxo-16-oxa-13,20,24-t riazanonacos-1-yl]-4-hydroxy-2-pyrrolidinyl)methyl ester
caggaggataccaacttgatt

SEQ ID NO: 5822 - RNA, 21 nt, synthetic construct
  source 1..21: mol_type = other RNA
  modified_base 1: mod_base = OTHER; note = 2'-O-methyluridine-3'-phosphorothioate
  modified_base 2: mod_base = OTHER; note = 2'-O-methylcytidine-3'-phosphorothioate
  modified_base 3: mod_base = OTHER; note = 2'-O-methyladenosine-3'-phosphate
  modified_base 4: mod_base = OTHER; note = 2'-O-methyluridine-3'-phosphate
  modified_base 5: mod_base = OTHER; note = 2'-O-methylcytidine-3'-phosphate
  modified_base 6: mod_base = OTHER; note = 2'-O-methyladenosine-3'-phosphate
  modified_base 7: mod_base = OTHER; note = 2'-deoxy-2'-fluorocytidine-3'-phosphate
  modified_base 8: mod_base = OTHER; note = 2'-O-methyluridine-3'-phosphate
  modified_base 9: mod_base = OTHER; note = 2'-deoxy-2'-fluoroadenosine-3'-phosphate
  modified_base 10: mod_base = OTHER; note = 2'-deoxy-2'-fluoroguanosine-3'-phosphate
  modified_base 11: mod_base = OTHER; note = 2'-deoxy-2'-fluorocytidine-3'-phosphate
  modified_base 12: mod_base = OTHER; note = 2'-O-methyluridine-3'-phosphate
  modified_base 13: mod_base = OTHER; note = 2'-O-methyladenosine-3'-phosphate
  modified_base 14: mod_base = OTHER; note = 2'-O-methylguanosine-3'-phosphate
  modified_base 15: mod_base = OTHER; note = 2'-O-methyluridine-3'-phosphate
  modified_base 16: mod_base = OTHER; note = 2'-O-methyluridine-3'-phosphate
  modified_base 17: mod_base = OTHER; note = 2'-O-methyluridine-3'-phosphate
  modified_base 18: mod_base = OTHER; note = 2'-O-methyluridine-3'-phosphate
  modified_base 19: mod_base = OTHER; note = 2'-O-methylcytidine-3'-phosphate
  modified_base 20: mod_base = OTHER; note = 2'-O-methyluridine-3'-phosphate
  modified_base 21: mod_base = OTHER; note = 2'-O-methyluridine-3'-phosphate ((2S,4R)-1-[29-[[2-(acetylamino)-2-deoxy-beta-D-galactopyra nosyl]oxy]-14,14-bis[[3-[[3-[[5-[[2-(acetylamino)-2-deoxy-b eta-D-galactopyranosyl]oxy]-1-oxopentyl]amino]propyl]amino] -3-oxopropoxy]methyl]-1,12,19,25-tetraoxo-16-oxa-13,20,24-t riazanonacos-1-yl]-4-hydroxy-2-pyrrolidinyl)methyl ester
tcatcactagctagttttctt

SEQ ID NO: 5823 - RNA, 21 nt, synthetic construct
  source 1..21: mol_type = other RNA
  modified_base 1: mod_base = OTHER; note = 2'-O-methylguanosine-3'-phosphorothioate
  modified_base 2: mod_base = OTHER; note = 2'-O-methylcytidine-3'-phosphorothioate
  modified_base 3: mod_base = OTHER; note = 2'-O-methyluridine-3'-phosphate
  modified_base 4: mod_base = OTHER; note = 2'-O-methyluridine-3'-phosphate
  modified_base 5: mod_base = OTHER; note = 2'-O-methyladenosine-3'-phosphate
  modified_base 6: mod_base = OTHER; note = 2'-O-methylcytidine-3'-phosphate
  modified_base 7: mod_base = OTHER; note = 2'-deoxy-2'-fluoroadenosine-3'-phosphate
  modified_base 8: mod_base = OTHER; note = 2'-O-methyladenosine-3'-phosphate
  modified_base 9: mod_base = OTHER; note = 2'-deoxy-2'-fluoroadenosine-3'-phosphate
  modified_base 10: mod_base = OTHER; note = 2'-deoxy-2'-fluorouridine-3'-phosphate
  modified_base 11: mod_base = OTHER; note = 2'-deoxy-2'-fluoroguanosine-3'-phosphate
  modified_base 12: mod_base = OTHER; note = 2'-O-methyluridine-3'-phosphate
  modified_base 13: mod_base = OTHER; note = 2'-O-methyluridine-3'-phosphate
  modified_base 14: mod_base = OTHER; note = 2'-O-methyluridine-3'-phosphate
  modified_base 15: mod_base = OTHER; note = 2'-O-methylguanosine-3'-phosphate
  modified_base 16: mod_base = OTHER; note = 2'-O-methylcytidine-3'-phosphate
  modified_base 17: mod_base = OTHER; note = 2'-O-methylcytidine-3'-phosphate
  modified_base 18: mod_base = OTHER; note = 2'-O-methyladenosine-3'-phosphate
  modified_base 19: mod_base = OTHER; note = 2'-O-methyluridine-3'-phosphate
  modified_base 20: mod_base = OTHER; note = 2'-O-methyluridine-3'-phosphate
  modified_base 21: mod_base = OTHER; note = 2'-O-methyluridine-3'-phosphate ((2S,4R)-1-[29-[[2-(acetylamino)-2-deoxy-beta-D-galactopyra nosyl]oxy]-14,14-bis[[3-[[3-[[5-[[2-(acetylamino)-2-deoxy-b eta-D-galactopyranosyl]oxy]-1-oxopentyl]amino]propyl]amino] -3-oxopropoxy]methyl]-1,12,19,25-tetraoxo-16-oxa-13,20,24-t riazanonacos-1-yl]-4-hydroxy-2-pyrrolidinyl)methyl ester
gcttacaaatgtttgccattt

SEQ ID NO: 5824 - RNA, 21 nt, synthetic construct
  source 1..21: mol_type = other RNA
  modified_base 1: mod_base = OTHER; note = 2'-O-methyladenosine-3'-phosphorothioate
  modified_base 2: mod_base = OTHER; note = 2'-O-methyladenosine-3'-phosphorothioate
  modified_base 3: mod_base = OTHER; note = 2'-O-methylguanosine-3'-phosphate
  modified_base 4: mod_base = OTHER; note = 2'-O-methyluridine-3'-phosphate
  modified_base 5: mod_base = OTHER; note = 2'-O-methylguanosine-3'-phosphate
  modified_base 6: mod_base = OTHER; note = 2'-O-methyluridine-3'-phosphate
  modified_base 7: mod_base = OTHER; note = 2'-deoxy-2'-fluorouridine-3'-phosphate
  modified_base 8: mod_base = OTHER; note = 2'-O-methyluridine-3'-phosphate
  modified_base 9: mod_base = OTHER; note = 2'-deoxy-2'-fluorouridine-3'-phosphate
  modified_base 10: mod_base = OTHER; note = 2'-deoxy-2'-fluoroguanosine-3'-phosphate
  modified_base 11: mod_base = OTHER; note = 2'-deoxy-2'-fluoroadenosine-3'-phosphate
  modified_base 12: mod_base = OTHER; note = 2'-O-methyladenosine-3'-phosphate
  modified_base 13: mod_base = OTHER; note = 2'-O-methylcytidine-3'-phosphate
  modified_base 14: mod_base = OTHER; note = 2'-O-methyluridine-3'-phosphate
  modified_base 15: mod_base = OTHER; note = 2'-O-methyluridine-3'-phosphate
  modified_base 16: mod_base = OTHER; note = 2'-O-methylguanosine-3'-phosphate
  modified_base 17: mod_base = OTHER; note = 2'-O-methyladenosine-3'-phosphate
  modified_base 18: mod_base = OTHER; note = 2'-O-methyluridine-3'-phosphate
  modified_base 19: mod_base = OTHER; note = 2'-O-methylcytidine-3'-phosphate
  modified_base 20: mod_base = OTHER; note = 2'-O-methyluridine-3'-phosphate
  modified_base 21: mod_base = OTHER; note = 2'-O-methyluridine-3'-phosphate ((2S,4R)-1-[29-[[2-(acetylamino)-2-deoxy-beta-D-galactopyra nosyl]oxy]-14,14-bis[[3-[[3-[[5-[[2-(acetylamino)-2-deoxy-b eta-D-galactopyranosyl]oxy]-1-oxopentyl]amino]propyl]amino] -3-oxopropoxy]methyl]-1,12,19,25-tetraoxo-16-oxa-13,20,24-t riazanonacos-1-yl]-4-hydroxy-2-pyrrolidinyl)methyl ester
aagtgttttgaacttgatctt

SEQ ID NO: 5825 - RNA, 21 nt, synthetic construct
  source 1..21: mol_type = other RNA
  modified_base 1: mod_base = OTHER; note = 2'-O-methyluridine-3'-phosphorothioate
  modified_base 2: mod_base = OTHER; note = 2'-O-methylguanosine-3'-phosphorothioate
  modified_base 3: mod_base = OTHER; note = 2'-O-methylcytidine-3'-phosphate
  modified_base 4: mod_base = OTHER; note = 2'-O-methyluridine-3'-phosphate
  modified_base 5: mod_base = OTHER; note = 2'-O-methyluridine-3'-phosphate
  modified_base 6: mod_base = OTHER; note = 2'-O-methyluridine-3'-phosphate
  modified_base 7: mod_base = OTHER; note = 2'-deoxy-2'-fluorouridine-3'-phosphate
  modified_base 8: mod_base = OTHER; note = 2'-O-methyluridine-3'-phosphate
  modified_base 9: mod_base = OTHER; note = 2'-deoxy-2'-fluorouridine-3'-phosphate
  modified_base 10: mod_base = OTHER; note = 2'-deoxy-2'-fluoroadenosine-3'-phosphate
  modified_base 11: mod_base = OTHER; note = 2'-deoxy-2'-fluoroguanosine-3'-phosphate
  modified_base 12: mod_base = OTHER; note = 2'-O-methylcytidine-3'-phosphate
  modified_base 13: mod_base = OTHER; note = 2'-O-methyluridine-3'-phosphate
  modified_base 14: mod_base = OTHER; note = 2'-O-methyluridine-3'-phosphate
  modified_base 15: mod_base = OTHER; note = 2'-O-methylcytidine-3'-phosphate
  modified_base 16: mod_base = OTHER; note = 2'-O-methyluridine-3'-phosphate
  modified_base 17: mod_base = OTHER; note = 2'-O-methylcytidine-3'-phosphate
  modified_base 18: mod_base = OTHER; note = 2'-O-methyluridine-3'-phosphate
  modified_base 19: mod_base = OTHER; note = 2'-O-methylcytidine-3'-phosphate
  modified_base 20: mod_base = OTHER; note = 2'-O-methyluridine-3'-phosphate
  modified_base 21: mod_base = OTHER; note = 2'-O-methyluridine-3'-phosphate ((2S,4R)-1-[29-[[2-(acetylamino)-2-deoxy-beta-D-galactopyra nosyl]oxy]-14,14-bis[[3-[[3-[[5-[[2-(acetylamino)-2-deoxy-b eta-D-galactopyranosyl]oxy]-1-oxopentyl]amino]propyl]amino] -3-oxopropoxy]methyl]-1,12,19,25-tetraoxo-16-oxa-13,20,24-t riazanonacos-1-yl]-4-hydroxy-2-pyrrolidinyl)methyl ester
tgcttttttagcttctctctt

SEQ ID NO: 5826 - RNA, 21 nt, synthetic construct
  source 1..21: mol_type = other RNA
  modified_base 1: mod_base = OTHER; note = 2'-O-methyluridine-3'-phosphorothioate
  modified_base 2: mod_base = OTHER; note = 2'-O-methylcytidine-3'-phosphorothioate
  modified_base 3: mod_base = OTHER; note = 2'-O-methyluridine-3'-phosphate
  modified_base 4: mod_base = OTHER; note = 2'-O-methylcytidine-3'-phosphate
  modified_base 5: mod_base = OTHER; note = 2'-O-methyluridine-3'-phosphate
  modified_base 6: mod_base = OTHER; note = 2'-O-methyluridine-3'-phosphate
  modified_base 7: mod_base = OTHER; note = 2'-deoxy-2'-fluoroguanosine-3'-phosphate
  modified_base 8: mod_base = OTHER; note = 2'-O-methyladenosine-3'-phosphate
  modified_base 9: mod_base = OTHER; note = 2'-deoxy-2'-fluoroadenosine-3'-phosphate
  modified_base 10: mod_base = OTHER; note = 2'-deoxy-2'-fluorouridine-3'-phosphate
  modified_base 11: mod_base = OTHER; note = 2'-deoxy-2'-fluorocytidine-3'-phosphate
  modified_base 12: mod_base = OTHER; note = 2'-O-methyladenosine-3'-phosphate
  modified_base 13: mod_base = OTHER; note = 2'-O-methylguanosine-3'-phosphate
  modified_base 14: mod_base = OTHER; note = 2'-O-methyladenosine-3'-phosphate
  modified_base 15: mod_base = OTHER; note = 2'-O-methylguanosine-3'-phosphate
  modified_base 16: mod_base = OTHER; note = 2'-O-methyluridine-3'-phosphate
  modified_base 17: mod_base = OTHER; note = 2'-O-methyladenosine-3'-phosphate
  modified_base 18: mod_base = OTHER; note = 2'-O-methyluridine-3'-phosphate
  modified_base 19: mod_base = OTHER; note = 2'-O-methylcytidine-3'-phosphate
  modified_base 20: mod_base = OTHER; note = 2'-O-methyladenosine-3'-phosphate
  modified_base 21: mod_base = OTHER; note = 2'-O-methyluridine-3'-phosphate ((2S,4R)-1-[29-[[2-(acetylamino)-2-deoxy-beta-D-galactopyra nosyl]oxy]-14,14-bis[[3-[[3-[[5-[[2-(acetylamino)-2-deoxy-b eta-D-galactopyranosyl]oxy]-1-oxopentyl]amino]propyl]amino] -3-oxopropoxy]methyl]-1,12,19,25-tetraoxo-16-oxa-13,20,24-t riazanonacos-1-yl]-4-hydroxy-2-pyrrolidinyl)methyl ester
tctcttgaatcagagtatcat

SEQ ID NO: 5827 - RNA, 21 nt, synthetic construct
  source 1..21: mol_type = other RNA
  modified_base 1: mod_base = OTHER; note = 2'-O-methyluridine-3'-phosphorothioate
  modified_base 2: mod_base = OTHER; note = 2'-O-methyluridine-3'-phosphorothioate
  modified_base 3: mod_base = OTHER; note = 2'-O-methylcytidine-3'-phosphate
  modified_base 4: mod_base = OTHER; note = 2'-O-methylcytidine-3'-phosphate
  modified_base 5: mod_base = OTHER; note = 2'-O-methyluridine-3'-phosphate
  modified_base 6: mod_base = OTHER; note = 2'-O-methylcytidine-3'-phosphate
  modified_base 7: mod_base = OTHER; note = 2'-deoxy-2'-fluorocytidine-3'-phosphate
  modified_base 8: mod_base = OTHER; note = 2'-O-methyladenosine-3'-phosphate
  modified_base 9: mod_base = OTHER; note = 2'-deoxy-2'-fluoroadenosine-3'-phosphate
  modified_base 10: mod_base = OTHER; note = 2'-deoxy-2'-fluoroguanosine-3'-phosphate
  modified_base 11: mod_base = OTHER; note = 2'-deoxy-2'-fluoroguanosine-3'-phosphate
  modified_base 12: mod_base = OTHER; note = 2'-O-methyladenosine-3'-phosphate
  modified_base 13: mod_base = OTHER; note = 2'-O-methylguanosine-3'-phosphate
  modified_base 14: mod_base = OTHER; note = 2'-O-methyluridine-3'-phosphate
  modified_base 15: mod_base = OTHER; note = 2'-O-methyluridine-3'-phosphate
  modified_base 16: mod_base = OTHER; note = 2'-O-methyladenosine-3'-phosphate
  modified_base 17: mod_base = OTHER; note = 2'-O-methylguanosine-3'-phosphate
  modified_base 18: mod_base = OTHER; note = 2'-O-methyladenosine-3'-phosphate
  modified_base 19: mod_base = OTHER; note = 2'-O-methyladenosine-3'-phosphate
  modified_base 20: mod_base = OTHER; note = 2'-O-methyluridine-3'-phosphate
  modified_base 21: mod_base = OTHER; note = 2'-O-methyluridine-3'-phosphate ((2S,4R)-1-[29-[[2-(acetylamino)-2-deoxy-beta-D-galactopyra nosyl]oxy]-14,14-bis[[3-[[3-[[5-[[2-(acetylamino)-2-deoxy-b eta-D-galactopyranosyl]oxy]-1-oxopentyl]amino]propyl]amino] -3-oxopropoxy]methyl]-1,12,19,25-tetraoxo-16-oxa-13,20,24-t riazanonacos-1-yl]-4-hydroxy-2-pyrrolidinyl)methyl ester
ttcctccaaggagttagaatt

SEQ ID NO: 5828 - RNA, 21 nt, synthetic construct
  source 1..21: mol_type = other RNA
  modified_base 1: mod_base = OTHER; note = 2'-O-methyladenosine-3'-phosphorothioate
  modified_base 2: mod_base = OTHER; note = 2'-O-methylguanosine-3'-phosphorothioate
  modified_base 3: mod_base = OTHER; note = 2'-O-methyladenosine-3'-phosphate
  modified_base 4: mod_base = OTHER; note = 2'-O-methyladenosine-3'-phosphate
  modified_base 5: mod_base = OTHER; note = 2'-O-methyluridine-3'-phosphate
  modified_base 6: mod_base = OTHER; note = 2'-O-methyluridine-3'-phosphate
  modified_base 7: mod_base = OTHER; note = 2'-deoxy-2'-fluorouridine-3'-phosphate
  modified_base 8: mod_base = OTHER; note = 2'-O-methylcytidine-3'-phosphate
  modified_base 9: mod_base = OTHER; note = 2'-deoxy-2'-fluorocytidine-3'-phosphate
  modified_base 10: mod_base = OTHER; note = 2'-deoxy-2'-fluorocytidine-3'-phosphate
  modified_base 11: mod_base = OTHER; note = 2'-deoxy-2'-fluoroadenosine-3'-phosphate
  modified_base 12: mod_base = OTHER; note = 2'-O-methylguanosine-3'-phosphate
  modified_base 13: mod_base = OTHER; note = 2'-O-methyluridine-3'-phosphate
  modified_base 14: mod_base = OTHER; note = 2'-O-methyluridine-3'-phosphate
  modified_base 15: mod_base = OTHER; note = 2'-O-methyluridine-3'-phosphate
  modified_base 16: mod_base = OTHER; note = 2'-O-methyladenosine-3'-phosphate
  modified_base 17: mod_base = OTHER; note = 2'-O-methyladenosine-3'-phosphate
  modified_base 18: mod_base = OTHER; note = 2'-O-methyladenosine-3'-phosphate
  modified_base 19: mod_base = OTHER; note = 2'-O-methyladenosine-3'-phosphate
  modified_base 20: mod_base = OTHER; note = 2'-O-methylcytidine-3'-phosphate
  modified_base 21: mod_base = OTHER; note = 2'-O-methyluridine-3'-phosphate ((2S,4R)-1-[29-[[2-(acetylamino)-2-deoxy-beta-D-galactopyra nosyl]oxy]-14,14-bis[[3-[[3-[[5-[[2-(acetylamino)-2-deoxy-b eta-D-galactopyranosyl]oxy]-1-oxopentyl]amino]propyl]amino] -3-oxopropoxy]methyl]-1,12,19,25-tetraoxo-16-oxa-13,20,24-t riazanonacos-1-yl]-4-hydroxy-2-pyrrolidinyl)methyl ester
agaatttcccagtttaaaact

SEQ ID NO: 5829 - RNA, 21 nt, synthetic construct
  source 1..21: mol_type = other RNA
  modified_base 1: mod_base = OTHER; note = 2'-O-methylguanosine-3'-phosphorothioate
  modified_base 2: mod_base = OTHER; note = 2'-O-methylguanosine-3'-phosphorothioate
  modified_base 3: mod_base = OTHER; note = 2'-O-methyluridine-3'-phosphate
  modified_base 4: mod_base = OTHER; note = 2'-O-methyluridine-3'-phosphate
  modified_base 5: mod_base = OTHER; note = 2'-O-methyluridine-3'-phosphate
  modified_base 6: mod_base = OTHER; note = 2'-O-methyluridine-3'-phosphate
  modified_base 7: mod_base = OTHER; note = 2'-deoxy-2'-fluorocytidine-3'-phosphate
  modified_base 8: mod_base = OTHER; note = 2'-O-methyluridine-3'-phosphate
  modified_base 9: mod_base = OTHER; note = 2'-deoxy-2'-fluorouridine-3'-phosphate
  modified_base 10: mod_base = OTHER; note = 2'-deoxy-2'-fluorouridine-3'-phosphate
  modified_base 11: mod_base = OTHER; note = 2'-deoxy-2'-fluoroguanosine-3'-phosphate
  modified_base 12: mod_base = OTHER; note = 2'-O-methyluridine-3'-phosphate
  modified_base 13: mod_base = OTHER; note = 2'-O-methylguanosine-3'-phosphate
  modified_base 14: mod_base = OTHER; note = 2'-O-methylcytidine-3'-phosphate
  modified_base 15: mod_base = OTHER; note = 2'-O-methyluridine-3'-phosphate
  modified_base 16: mod_base = OTHER; note = 2'-O-methyluridine-3'-phosphate
  modified_base 17: mod_base = OTHER; note = 2'-O-methylcytidine-3'-phosphate
  modified_base 18: mod_base = OTHER; note = 2'-O-methyluridine-3'-phosphate
  modified_base 19: mod_base = OTHER; note = 2'-O-methylcytidine-3'-phosphate
  modified_base 20: mod_base = OTHER; note = 2'-O-methyladenosine-3'-phosphate
  modified_base 21: mod_base = OTHER; note = 2'-O-methyluridine-3'-phosphate ((2S,4R)-1-[29-[[2-(acetylamino)-2-deoxy-beta-D-galactopyra nosyl]oxy]-14,14-bis[[3-[[3-[[5-[[2-(acetylamino)-2-deoxy-b eta-D-galactopyranosyl]oxy]-1-oxopentyl]amino]propyl]amino] -3-oxopropoxy]methyl]-1,12,19,25-tetraoxo-16-oxa-13,20,24-t riazanonacos-1-yl]-4-hydroxy-2-pyrrolidinyl)methyl ester
ggttttctttgtgcttctcat

SEQ ID NO: 5830 - RNA, 21 nt, synthetic construct
  source 1..21: mol_type = other RNA
  modified_base 1: mod_base = OTHER; note = 2'-O-methylcytidine-3'-phosphorothioate
  modified_base 2: mod_base = OTHER; note = 2'-O-methyluridine-3'-phosphorothioate
  modified_base 3: mod_base = OTHER; note = 2'-O-methylcytidine-3'-phosphate
  modified_base 4: mod_base = OTHER; note = 2'-O-methyladenosine-3'-phosphate
  modified_base 5: mod_base = OTHER; note = 2'-O-methyluridine-3'-phosphate
  modified_base 6: mod_base = OTHER; note = 2'-O-methyluridine-3'-phosphate
  modified_base 7: mod_base = OTHER; note = 2'-deoxy-2'-fluorouridine-3'-phosphate
  modified_base 8: mod_base = OTHER; note = 2'-O-methyluridine-3'-phosphate
  modified_base 9: mod_base = OTHER; note = 2'-deoxy-2'-fluorouridine-3'-phosphate
  modified_base 10: mod_base = OTHER; note = 2'-deoxy-2'-fluorocytidine-3'-phosphate
  modified_base 11: mod_base = OTHER; note = 2'-deoxy-2'-fluorocytidine-3'-phosphate
  modified_base 12: mod_base = OTHER; note = 2'-O-methyluridine-3'-phosphate
  modified_base 13: mod_base = OTHER; note = 2'-O-methyluridine-3'-phosphate
  modified_base 14: mod_base = OTHER; note = 2'-O-methyluridine-3'-phosphate
  modified_base 15: mod_base = OTHER; note = 2'-O-methylguanosine-3'-phosphate
  modified_base 16: mod_base = OTHER; note = 2'-O-methyluridine-3'-phosphate
  modified_base 17: mod_base = OTHER; note = 2'-O-methyluridine-3'-phosphate
  modified_base 18: mod_base = OTHER; note = 2'-O-methylguanosine-3'-phosphate
  modified_base 19: mod_base = OTHER; note = 2'-O-methyladenosine-3'-phosphate
  modified_base 20: mod_base = OTHER; note = 2'-O-methyluridine-3'-phosphate
  modified_base 21: mod_base = OTHER; note = 2'-O-methyluridine-3'-phosphate ((2S,4R)-1-[29-[[2-(acetylamino)-2-deoxy-beta-D-galactopyra nosyl]oxy]-14,14-bis[[3-[[3-[[5-[[2-(acetylamino)-2-deoxy-b eta-D-galactopyranosyl]oxy]-1-oxopentyl]amino]propyl]amino] -3-oxopropoxy]methyl]-1,12,19,25-tetraoxo-16-oxa-13,20,24-t riazanonacos-1-yl]-4-hydroxy-2-pyrrolidinyl)methyl ester
ctcatttttcctttgttgatt

SEQ ID NO: 5831 - RNA, 21 nt, synthetic construct
  source 1..21: mol_type = other RNA
  modified_base 1: mod_base = OTHER; note = 2'-O-methylcytidine-3'-phosphorothioate
  modified_base 2: mod_base = OTHER; note = 2'-O-methyluridine-3'-phosphorothioate
  modified_base 3: mod_base = OTHER; note = 2'-O-methylguanosine-3'-phosphate
  modified_base 4: mod_base = OTHER; note = 2'-O-methyluridine-3'-phosphate
  modified_base 5: mod_base = OTHER; note = 2'-O-methylguanosine-3'-phosphate
  modified_base 6: mod_base = OTHER; note = 2'-O-methyladenosine-3'-phosphate
  modified_base 7: mod_base = OTHER; note = 2'-deoxy-2'-fluorouridine-3'-phosphate
  modified_base 8: mod_base = OTHER; note = 2'-O-methyluridine-3'-phosphate
  modified_base 9: mod_base = OTHER; note = 2'-deoxy-2'-fluorouridine-3'-phosphate
  modified_base 10: mod_base = OTHER; note = 2'-deoxy-2'-fluorouridine-3'-phosphate
  modified_base 11: mod_base = OTHER; note = 2'-deoxy-2'-fluorouridine-3'-phosphate
  modified_base 12: mod_base = OTHER; note = 2'-O-methylguanosine-3'-phosphate
  modified_base 13: mod_base = OTHER; note = 2'-O-methyluridine-3'-phosphate
  modified_base 14: mod_base = OTHER; note = 2'-O-methyluridine-3'-phosphate
  modified_base 15: mod_base = OTHER; note = 2'-O-methylcytidine-3'-phosphate
  modified_base 16: mod_base = OTHER; note = 2'-O-methyluridine-3'-phosphate
  modified_base 17: mod_base = OTHER; note = 2'-O-methylcytidine-3'-phosphate
  modified_base 18: mod_base = OTHER; note = 2'-O-methyluridine-3'-phosphate
  modified_base 19: mod_base = OTHER; note = 2'-O-methyluridine-3'-phosphate
  modified_base 20: mod_base = OTHER; note = 2'-O-methylcytidine-3'-phosphate
  modified_base 21: mod_base = OTHER; note = 2'-O-methyluridine-3'-phosphate ((2S,4R)-1-[29-[[2-(acetylamino)-2-deoxy-beta-D-galactopyra nosyl]oxy]-14,14-bis[[3-[[3-[[5-[[2-(acetylamino)-2-deoxy-b eta-D-galactopyranosyl]oxy]-1-oxopentyl]amino]propyl]amino] -3-oxopropoxy]methyl]-1,12,19,25-tetraoxo-16-oxa-13,20,24-t riazanonacos-1-yl]-4-hydroxy-2-pyrrolidinyl)methyl ester
ctgtgatttttgttctcttct

SEQ ID NO: 5832 - RNA, 21 nt, synthetic construct
  source 1..21: mol_type = other RNA
  modified_base 1: mod_base = OTHER; note = 2'-O-methylcytidine-3'-phosphorothioate
  modified_base 2: mod_base = OTHER; note = 2'-O-methyluridine-3'-phosphorothioate
  modified_base 3: mod_base = OTHER; note = 2'-O-methyluridine-3'-phosphate
  modified_base 4: mod_base = OTHER; note = 2'-O-methylcytidine-3'-phosphate
  modified_base 5: mod_base = OTHER; note = 2'-O-methylcytidine-3'-phosphate
  modified_base 6: mod_base = OTHER; note = 2'-O-methylcytidine-3'-phosphate
  modified_base 7: mod_base = OTHER; note = 2'-deoxy-2'-fluorouridine-3'-phosphate
  modified_base 8: mod_base = OTHER; note = 2'-O-methylguanosine-3'-phosphate
  modified_base 9: mod_base = OTHER; note = 2'-deoxy-2'-fluoroadenosine-3'-phosphate
  modified_base 10: mod_base = OTHER; note = 2'-deoxy-2'-fluoroadenosine-3'-phosphate
  modified_base 11: mod_base = OTHER; note = 2'-deoxy-2'-fluoroguanosine-3'-phosphate
  modified_base 12: mod_base = OTHER; note = 2'-O-methyluridine-3'-phosphate
  modified_base 13: mod_base = OTHER; note = 2'-O-methylguanosine-3'-phosphate
  modified_base 14: mod_base = OTHER; note = 2'-O-methylcytidine-3'-phosphate
  modified_base 15: mod_base = OTHER; note = 2'-O-methyluridine-3'-phosphate
  modified_base 16: mod_base = OTHER; note = 2'-O-methyluridine-3'-phosphate
  modified_base 17: mod_base = OTHER; note = 2'-O-methyluridine-3'-phosphate
  modified_base 18: mod_base = OTHER; note = 2'-O-methyladenosine-3'-phosphate
  modified_base 19: mod_base = OTHER; note = 2'-O-methylcytidine-3'-phosphate
  modified_base 20: mod_base = OTHER; note = 2'-O-methyladenosine-3'-phosphate
  modified_base 21: mod_base = OTHER; note = 2'-O-methyluridine-3'-phosphate ((2S,4R)-1-[29-[[2-(acetylamino)-2-deoxy-beta-D-galactopyra nosyl]oxy]-14,14-bis[[3-[[3-[[5-[[2-(acetylamino)-2-deoxy-b eta-D-galactopyranosyl]oxy]-1-oxopentyl]amino]propyl]amino] -3-oxopropoxy]methyl]-1,12,19,25-tetraoxo-16-oxa-13,20,24-t riazanonacos-1-yl]-4-hydroxy-2-pyrrolidinyl)methyl ester
cttccctgaagtgctttacat

SEQ ID NO: 5833 - RNA, 21 nt, synthetic construct
  source 1..21: mol_type = other RNA
  modified_base 1: mod_base = OTHER; note = 2'-O-methyluridine-3'-phosphorothioate
  modified_base 2: mod_base = OTHER; note = 2'-O-methylcytidine-3'-phosphorothioate
  modified_base 3: mod_base = OTHER; note = 2'-O-methylcytidine-3'-phosphate
  modified_base 4: mod_base = OTHER; note = 2'-O-methyladenosine-3'-phosphate
  modified_base 5: mod_base = OTHER; note = 2'-O-methyluridine-3'-phosphate
  modified_base 6: mod_base = OTHER; note = 2'-O-methylcytidine-3'-phosphate
  modified_base 7: mod_base = OTHER; note = 2'-deoxy-2'-fluoroadenosine-3'-phosphate
  modified_base 8: mod_base = OTHER; note = 2'-O-methyluridine-3'-phosphate
  modified_base 9: mod_base = OTHER; note = 2'-deoxy-2'-fluorouridine-3'-phosphate
  modified_base 10: mod_base = OTHER; note = 2'-deoxy-2'-fluoroguanosine-3'-phosphate
  modified_base 11: mod_base = OTHER; note = 2'-deoxy-2'-fluorouridine-3'-phosphate
  modified_base 12: mod_base = OTHER; note = 2'-O-methyluridine-3'-phosphate
  modified_base 13: mod_base = OTHER; note = 2'-O-methyladenosine-3'-phosphate
  modified_base 14: mod_base = OTHER; note = 2'-O-methyluridine-3'-phosphate
  modified_base 15: mod_base = OTHER; note = 2'-O-methyluridine-3'-phosphate
  modified_base 16: mod_base = OTHER; note = 2'-O-methyluridine-3'-phosphate
  modified_base 17: mod_base = OTHER; note = 2'-O-methyluridine-3'-phosphate
  modified_base 18: mod_base = OTHER; note = 2'-O-methyladenosine-3'-phosphate
  modified_base 19: mod_base = OTHER; note = 2'-O-methyladenosine-3'-phosphate
  modified_base 20: mod_base = OTHER; note = 2'-O-methylcytidine-3'-phosphate
  modified_base 21: mod_base = OTHER; note = 2'-O-methyluridine-3'-phosphate ((2S,4R)-1-[29-[[2-(acetylamino)-2-deoxy-beta-D-galactopyra nosyl]oxy]-14,14-bis[[3-[[3-[[5-[[2-(acetylamino)-2-deoxy-b eta-D-galactopyranosyl]oxy]-1-oxopentyl]amino]propyl]amino] -3-oxopropoxy]methyl]-1,12,19,25-tetraoxo-16-oxa-13,20,24-t riazanonacos-1-yl]-4-hydroxy-2-pyrrolidinyl)methyl ester
tccatcattgttattttaact

SEQ ID NO: 5834 - RNA, 21 nt, synthetic construct
  source 1..21: mol_type = other RNA
  modified_base 1: mod_base = OTHER; note = 2'-O-methyladenosine-3'-phosphorothioate
  modified_base 2: mod_base = OTHER; note = 2'-O-methyluridine-3'-phosphorothioate
  modified_base 3: mod_base = OTHER; note = 2'-O-methyladenosine-3'-phosphate
  modified_base 4: mod_base = OTHER; note = 2'-O-methylguanosine-3'-phosphate
  modified_base 5: mod_base = OTHER; note = 2'-O-methyluridine-3'-phosphate
  modified_base 6: mod_base = OTHER; note = 2'-O-methyladenosine-3'-phosphate
  modified_base 7: mod_base = OTHER; note = 2'-deoxy-2'-fluoroadenosine-3'-phosphate
  modified_base 8: mod_base = OTHER; note = 2'-O-methyluridine-3'-phosphate
  modified_base 9: mod_base = OTHER; note = 2'-deoxy-2'-fluorouridine-3'-phosphate
  modified_base 10: mod_base = OTHER; note = 2'-deoxy-2'-fluorocytidine-3'-phosphate
  modified_base 11: mod_base = OTHER; note = 2'-deoxy-2'-fluoroadenosine-3'-phosphate
  modified_base 12: mod_base = OTHER; note = 2'-O-methylcytidine-3'-phosphate
  modified_base 13: mod_base = OTHER; note = 2'-O-methyladenosine-3'-phosphate
  modified_base 14: mod_base = OTHER; note = 2'-O-methylguanosine-3'-phosphate
  modified_base 15: mod_base = OTHER; note = 2'-O-methyluridine-3'-phosphate
  modified_base 16: mod_base = OTHER; note = 2'-O-methylcytidine-3'-phosphate
  modified_base 17: mod_base = OTHER; note = 2'-O-methylcytidine-3'-phosphate
  modified_base 18: mod_base = OTHER; note = 2'-O-methyluridine-3'-phosphate
  modified_base 19: mod_base = OTHER; note = 2'-O-methylcytidine-3'-phosphate
  modified_base 20: mod_base = OTHER; note = 2'-O-methyladenosine-3'-phosphate
  modified_base 21: mod_base = OTHER; note = 2'-O-methyluridine-3'-phosphate ((2S,4R)-1-[29-[[2-(acetylamino)-2-deoxy-beta-D-galactopyra nosyl]oxy]-14,14-bis[[3-[[3-[[5-[[2-(acetylamino)-2-deoxy-b eta-D-galactopyranosyl]oxy]-1-oxopentyl]amino]propyl]amino] -3-oxopropoxy]methyl]-1,12,19,25-tetraoxo-16-oxa-13,20,24-t riazanonacos-1-yl]-4-hydroxy-2-pyrrolidinyl)methyl ester
atagtaattcacagtcctcat

SEQ ID NO: 5835 - RNA, 21 nt, synthetic construct
  source 1..21: mol_type = other RNA
  modified_base 1: mod_base = OTHER; note = 2'-O-methylcytidine-3'-phosphorothioate
  modified_base 2: mod_base = OTHER; note = 2'-O-methylcytidine-3'-phosphorothioate
  modified_base 3: mod_base = OTHER; note = 2'-O-methyluridine-3'-phosphate
  modified_base 4: mod_base = OTHER; note = 2'-O-methylcytidine-3'-phosphate
  modified_base 5: mod_base = OTHER; note = 2'-O-methyladenosine-3'-phosphate
  modified_base 6: mod_base = OTHER; note = 2'-O-methylguanosine-3'-phosphate
  modified_base 7: mod_base = OTHER; note = 2'-deoxy-2'-fluoroadenosine-3'-phosphate
  modified_base 8: mod_base = OTHER; note = 2'-O-methyladenosine-3'-phosphate
  modified_base 9: mod_base = OTHER; note = 2'-deoxy-2'-fluoroguanosine-3'-phosphate
  modified_base 10: mod_base = OTHER; note = 2'-deoxy-2'-fluorocytidine-3'-phosphate
  modified_base 11: mod_base = OTHER; note = 2'-deoxy-2'-fluorocytidine-3'-phosphate
  modified_base 12: mod_base = OTHER; note = 2'-O-methyluridine-3'-phosphate
  modified_base 13: mod_base = OTHER; note = 2'-O-methyladenosine-3'-phosphate
  modified_base 14: mod_base = OTHER; note = 2'-O-methyluridine-3'-phosphate
  modified_base 15: mod_base = OTHER; note = 2'-O-methyluridine-3'-phosphate
  modified_base 16: mod_base = OTHER; note = 2'-O-methyluridine-3'-phosphate
  modified_base 17: mod_base = OTHER; note = 2'-O-methyluridine-3'-phosphate
  modified_base 18: mod_base = OTHER; note = 2'-O-methyluridine-3'-phosphate
  modified_base 19: mod_base = OTHER; note = 2'-O-methyladenosine-3'-phosphate
  modified_base 20: mod_base = OTHER; note = 2'-O-methyladenosine-3'-phosphate
  modified_base 21: mod_base = OTHER; note = 2'-O-methyluridine-3'-phosphate ((2S,4R)-1-[29-[[2-(acetylamino)-2-deoxy-beta-D-galactopyra nosyl]oxy]-14,14-bis[[3-[[3-[[5-[[2-(acetylamino)-2-deoxy-b eta-D-galactopyranosyl]oxy]-1-oxopentyl]amino]propyl]amino] -3-oxopropoxy]methyl]-1,12,19,25-tetraoxo-16-oxa-13,20,24-t riazanonacos-1-yl]-4-hydroxy-2-pyrrolidinyl)methyl ester
cctcagaagcctatttttaat

SEQ ID NO: 5836 - RNA, 21 nt, synthetic construct
  source 1..21: mol_type = other RNA
  modified_base 1: mod_base = OTHER; note = 2'-O-methyladenosine-3'-phosphorothioate
  modified_base 2: mod_base = OTHER; note = 2'-O-methylcytidine-3'-phosphorothioate
  modified_base 3: mod_base = OTHER; note = 2'-O-methyladenosine-3'-phosphate
  modified_base 4: mod_base = OTHER; note = 2'-O-methyladenosine-3'-phosphate
  modified_base 5: mod_base = OTHER; note = 2'-O-methylcytidine-3'-phosphate
  modified_base 6: mod_base = OTHER; note = 2'-O-methylcytidine-3'-phosphate
  modified_base 7: mod_base = OTHER; note = 2'-deoxy-2'-fluorocytidine-3'-phosphate
  modified_base 8: mod_base = OTHER; note = 2'-O-methyluridine-3'-phosphate
  modified_base 9: mod_base = OTHER; note = 2'-deoxy-2'-fluorouridine-3'-phosphate
  modified_base 10: mod_base = OTHER; note = 2'-deoxy-2'-fluorocytidine-3'-phosphate
  modified_base 11: mod_base = OTHER; note = 2'-deoxy-2'-fluorocytidine-3'-phosphate
  modified_base 12: mod_base = OTHER; note = 2'-O-methyluridine-3'-phosphate
  modified_base 13: mod_base = OTHER; note = 2'-O-methylcytidine-3'-phosphate
  modified_base 14: mod_base = OTHER; note = 2'-O-methyluridine-3'-phosphate
  modified_base 15: mod_base = OTHER; note = 2'-O-methyluridine-3'-phosphate
  modified_base 16: mod_base = OTHER; note = 2'-O-methyluridine-3'-phosphate
  modified_base 17: mod_base = OTHER; note = 2'-O-methyluridine-3'-phosphate
  modified_base 18: mod_base = OTHER; note = 2'-O-methylcytidine-3'-phosphate
  modified_base 19: mod_base = OTHER; note = 2'-O-methyluridine-3'-phosphate
  modified_base 20: mod_base = OTHER; note = 2'-O-methylcytidine-3'-phosphate
  modified_base 21: mod_base = OTHER; note = 2'-O-methyluridine-3'-phosphate ((2S,4R)-1-[29-[[2-(acetylamino)-2-deoxy-beta-D-galactopyra nosyl]oxy]-14,14-bis[[3-[[3-[[5-[[2-(acetylamino)-2-deoxy-b eta-D-galactopyranosyl]oxy]-1-oxopentyl]amino]propyl]amino] -3-oxopropoxy]methyl]-1,12,19,25-tetraoxo-16-oxa-13,20,24-t riazanonacos-1-yl]-4-hydroxy-2-pyrrolidinyl)methyl ester
acaacccttcctcttttctct

SEQ ID NO: 5837 - RNA, 21 nt, synthetic construct
  source 1..21: mol_type = other RNA
  modified_base 1: mod_base = OTHER; note = 2'-O-methylcytidine-3'-phosphorothioate
  modified_base 2: mod_base = OTHER; note = 2'-O-methyluridine-3'-phosphorothioate
  modified_base 3: mod_base = OTHER; note = 2'-O-methylcytidine-3'-phosphate
  modified_base 4: mod_base = OTHER; note = 2'-O-methyluridine-3'-phosphate
  modified_base 5: mod_base = OTHER; note = 2'-O-methylcytidine-3'-phosphate
  modified_base 6: mod_base = OTHER; note = 2'-O-methyladenosine-3'-phosphate
  modified_base 7: mod_base = OTHER; note = 2'-deoxy-2'-fluorouridine-3'-phosphate
  modified_base 8: mod_base = OTHER; note = 2'-O-methylcytidine-3'-phosphate
  modified_base 9: mod_base = OTHER; note = 2'-deoxy-2'-fluorouridine-3'-phosphate
  modified_base 10: mod_base = OTHER; note = 2'-deoxy-2'-fluorocytidine-3'-phosphate
  modified_base 11: mod_base = OTHER; note = 2'-deoxy-2'-fluoroadenosine-3'-phosphate
  modified_base 12: mod_base = OTHER; note = 2'-O-methylcytidine-3'-phosphate
  modified_base 13: mod_base = OTHER; note = 2'-O-methylcytidine-3'-phosphate
  modified_base 14: mod_base = OTHER; note = 2'-O-methyluridine-3'-phosphate
  modified_base 15: mod_base = OTHER; note = 2'-O-methylcytidine-3'-phosphate
  modified_base 16: mod_base = OTHER; note = 2'-O-methyluridine-3'-phosphate
  modified_base 17: mod_base = OTHER; note = 2'-O-methylcytidine-3'-phosphate
  modified_base 18: mod_base = OTHER; note = 2'-O-methyluridine-3'-phosphate
  modified_base 19: mod_base = OTHER; note = 2'-O-methylguanosine-3'-phosphate
  modified_base 20: mod_base = OTHER; note = 2'-O-methyluridine-3'-phosphate
  modified_base 21: mod_base = OTHER; note = 2'-O-methyluridine-3'-phosphate ((2S,4R)-1-[29-[[2-(acetylamino)-2-deoxy-beta-D-galactopyra nosyl]oxy]-14,14-bis[[3-[[3-[[5-[[2-(acetylamino)-2-deoxy-b eta-D-galactopyranosyl]oxy]-1-oxopentyl]amino]propyl]amino] -3-oxopropoxy]methyl]-1,12,19,25-tetraoxo-16-oxa-13,20,24-t riazanonacos-1-yl]-4-hydroxy-2-pyrrolidinyl)methyl ester
ctctcatctcacctctctgtt

SEQ ID NO: 5838 - RNA, 21 nt, synthetic construct
  source 1..21: mol_type = other RNA
  modified_base 1: mod_base = OTHER; note = 2'-O-methyluridine-3'-phosphorothioate
  modified_base 2: mod_base = OTHER; note = 2'-O-methylcytidine-3'-phosphorothioate
  modified_base 3: mod_base = OTHER; note = 2'-O-methyluridine-3'-phosphate
  modified_base 4: mod_base = OTHER; note = 2'-O-methylguanosine-3'-phosphate
  modified_base 5: mod_base = OTHER; note = 2'-O-methyluridine-3'-phosphate
  modified_base 6: mod_base = OTHER; note = 2'-O-methylguanosine-3'-phosphate
  modified_base 7: mod_base = OTHER; note = 2'-deoxy-2'-fluorouridine-3'-phosphate
  modified_base 8: mod_base = OTHER; note = 2'-O-methyluridine-3'-phosphate
  modified_base 9: mod_base = OTHER; note = 2'-deoxy-2'-fluoroguanosine-3'-phosphate
  modified_base 10: mod_base = OTHER; note = 2'-deoxy-2'-fluoroadenosine-3'-phosphate
  modified_base 11: mod_base = OTHER; note = 2'-deoxy-2'-fluorouridine-3'-phosphate
  modified_base 12: mod_base = OTHER; note = 2'-O-methyluridine-3'-phosphate
  modified_base 13: mod_base = OTHER; note = 2'-O-methyladenosine-3'-phosphate
  modified_base 14: mod_base = OTHER; note = 2'-O-methylcytidine-3'-phosphate
  modified_base 15: mod_base = OTHER; note = 2'-O-methyluridine-3'-phosphate
  modified_base 16: mod_base = OTHER; note = 2'-O-methyladenosine-3'-phosphate
  modified_base 17: mod_base = OTHER; note = 2'-O-methyladenosine-3'-phosphate
  modified_base 18: mod_base = OTHER; note = 2'-O-methyluridine-3'-phosphate
  modified_base 19: mod_base = OTHER; note = 2'-O-methylcytidine-3'-phosphate
  modified_base 20: mod_base = OTHER; note = 2'-O-methyladenosine-3'-phosphate
  modified_base 21: mod_base = OTHER; note = 2'-O-methyluridine-3'-phosphate ((2S,4R)-1-[29-[[2-(acetylamino)-2-deoxy-beta-D-galactopyra nosyl]oxy]-14,14-bis[[3-[[3-[[5-[[2-(acetylamino)-2-deoxy-b eta-D-galactopyranosyl]oxy]-1-oxopentyl]amino]propyl]amino] -3-oxopropoxy]methyl]-1,12,19,25-tetraoxo-16-oxa-13,20,24-t riazanonacos-1-yl]-4-hydroxy-2-pyrrolidinyl)methyl ester
tctgtgttgattactaatcat

SEQ ID NO: 5839 - RNA, 21 nt, synthetic construct
  source 1..21: mol_type = other RNA
  modified_base 1: mod_base = OTHER; note = 2'-O-methyluridine-3'-phosphorothioate
  modified_base 2: mod_base = OTHER; note = 2'-O-methylcytidine-3'-phosphorothioate
  modified_base 3: mod_base = OTHER; note = 2'-O-methyluridine-3'-phosphate
  modified_base 4: mod_base = OTHER; note = 2'-O-methyluridine-3'-phosphate
  modified_base 5: mod_base = OTHER; note = 2'-O-methyladenosine-3'-phosphate
  modified_base 6: mod_base = OTHER; note = 2'-O-methylguanosine-3'-phosphate
  modified_base 7: mod_base = OTHER; note = 2'-deoxy-2'-fluoroadenosine-3'-phosphate
  modified_base 8: mod_base = OTHER; note = 2'-O-methyluridine-3'-phosphate
  modified_base 9: mod_base = OTHER; note = 2'-deoxy-2'-fluoroadenosine-3'-phosphate
  modified_base 10: mod_base = OTHER; note = 2'-deoxy-2'-fluorouridine-3'-phosphate
  modified_base 11: mod_base = OTHER; note = 2'-deoxy-2'-fluorouridine-3'-phosphate
  modified_base 12: mod_base = OTHER; note = 2'-O-methyladenosine-3'-phosphate
  modified_base 13: mod_base = OTHER; note = 2'-O-methyluridine-3'-phosphate
  modified_base 14: mod_base = OTHER; note = 2'-O-methyluridine-3'-phosphate
  modified_base 15: mod_base = OTHER; note = 2'-O-methylguanosine-3'-phosphate
  modified_base 16: mod_base = OTHER; note = 2'-O-methylcytidine-3'-phosphate
  modified_base 17: mod_base = OTHER; note = 2'-O-methyluridine-3'-phosphate
  modified_base 18: mod_base = OTHER; note = 2'-O-methyladenosine-3'-phosphate
  modified_base 19: mod_base = OTHER; note = 2'-O-methylguanosine-3'-phosphate
  modified_base 20: mod_base = OTHER; note = 2'-O-methyluridine-3'-phosphate
  modified_base 21: mod_base = OTHER; note = 2'-O-methyluridine-3'-phosphate ((2S,4R)-1-[29-[[2-(acetylamino)-2-deoxy-beta-D-galactopyra nosyl]oxy]-14,14-bis[[3-[[3-[[5-[[2-(acetylamino)-2-deoxy-b eta-D-galactopyranosyl]oxy]-1-oxopentyl]amino]propyl]amino] -3-oxopropoxy]methyl]-1,12,19,25-tetraoxo-16-oxa-13,20,24-t riazanonacos-1-yl]-4-hydroxy-2-pyrrolidinyl)methyl ester
tcttagatattattgctagtt

SEQ ID NO: 5840 - RNA, 21 nt, synthetic construct
  source 1..21: mol_type = other RNA
  modified_base 1: mod_base = OTHER; note = 2'-O-methyluridine-3'-phosphorothioate
  modified_base 2: mod_base = OTHER; note = 2'-O-methylguanosine-3'-phosphorothioate
  modified_base 3: mod_base = OTHER; note = 2'-O-methyladenosine-3'-phosphate
  modified_base 4: mod_base = OTHER; note = 2'-O-methyladenosine-3'-phosphate
  modified_base 5: mod_base = OTHER; note = 2'-O-methylguanosine-3'-phosphate
  modified_base 6: mod_base = OTHER; note = 2'-O-methylcytidine-3'-phosphate
  modified_base 7: mod_base = OTHER; note = 2'-deoxy-2'-fluorouridine-3'-phosphate
  modified_base 8: mod_base = OTHER; note = 2'-O-methyluridine-3'-phosphate
  modified_base 9: mod_base = OTHER; note = 2'-deoxy-2'-fluorouridine-3'-phosphate
  modified_base 10: mod_base = OTHER; note = 2'-deoxy-2'-fluorouridine-3'-phosphate
  modified_base 11: mod_base = OTHER; note = 2'-deoxy-2'-fluorocytidine-3'-phosphate
  modified_base 12: mod_base = OTHER; note = 2'-O-methyluridine-3'-phosphate
  modified_base 13: mod_base = OTHER; note = 2'-O-methylguanosine-3'-phosphate
  modified_base 14: mod_base = OTHER; note = 2'-O-methyladenosine-3'-phosphate
  modified_base 15: mod_base = OTHER; note = 2'-O-methyluridine-3'-phosphate
  modified_base 16: mod_base = OTHER; note = 2'-O-methyladenosine-3'-phosphate
  modified_base 17: mod_base = OTHER; note = 2'-O-methyladenosine-3'-phosphate
  modified_base 18: mod_base = OTHER; note = 2'-O-methyluridine-3'-phosphate
  modified_base 19: mod_base = OTHER; note = 2'-O-methyluridine-3'-phosphate
  modified_base 20: mod_base = OTHER; note = 2'-O-methyladenosine-3'-phosphate
  modified_base 21: mod_base = OTHER; note = 2'-O-methyluridine-3'-phosphate ((2S,4R)-1-[29-[[2-(acetylamino)-2-deoxy-beta-D-galactopyra nosyl]oxy]-14,14-bis[[3-[[3-[[5-[[2-(acetylamino)-2-deoxy-b eta-D-galactopyranosyl]oxy]-1-oxopentyl]amino]propyl]amino] -3-oxopropoxy]methyl]-1,12,19,25-tetraoxo-16-oxa-13,20,24-t riazanonacos-1-yl]-4-hydroxy-2-pyrrolidinyl)methyl ester
tgaagcttttctgataattat

SEQ ID NO: 5841 - RNA, 21 nt, synthetic construct
  source 1..21: mol_type = other RNA
  modified_base 1: mod_base = OTHER; note = 2'-O-methylcytidine-3'-phosphorothioate
  modified_base 2: mod_base = OTHER; note = 2'-O-methyladenosine-3'-phosphorothioate
  modified_base 3: mod_base = OTHER; note = 2'-O-methylguanosine-3'-phosphate
  modified_base 4: mod_base = OTHER; note = 2'-O-methyluridine-3'-phosphate
  modified_base 5: mod_base = OTHER; note = 2'-O-methyladenosine-3'-phosphate
  modified_base 6: mod_base = OTHER; note = 2'-O-methyladenosine-3'-phosphate
  modified_base 7: mod_base = OTHER; note = 2'-deoxy-2'-fluoroadenosine-3'-phosphate
  modified_base 8: mod_base = OTHER; note = 2'-O-methyluridine-3'-phosphate
  modified_base 9: mod_base = OTHER; note = 2'-deoxy-2'-fluoroadenosine-3'-phosphate
  modified_base 10: mod_base = OTHER; note = 2'-deoxy-2'-fluorouridine-3'-phosphate
  modified_base 11: mod_base = OTHER; note = 2'-deoxy-2'-fluoroadenosine-3'-phosphate
  modified_base 12: mod_base = OTHER; note = 2'-O-methyluridine-3'-phosphate
  modified_base 13: mod_base = OTHER; note = 2'-O-methyluridine-3'-phosphate
  modified_base 14: mod_base = OTHER; note = 2'-O-methylguanosine-3'-phosphate
  modified_base 15: mod_base = OTHER; note = 2'-O-methyladenosine-3'-phosphate
  modified_base 16: mod_base = OTHER; note = 2'-O-methylguanosine-3'-phosphate
  modified_base 17: mod_base = OTHER; note = 2'-O-methylcytidine-3'-phosphate
  modified_base 18: mod_base = OTHER; note = 2'-O-methylcytidine-3'-phosphate
  modified_base 19: mod_base = OTHER; note = 2'-O-methyladenosine-3'-phosphate
  modified_base 20: mod_base = OTHER; note = 2'-O-methyluridine-3'-phosphate
  modified_base 21: mod_base = OTHER; note = 2'-O-methyluridine-3'-phosphate ((2S,4R)-1-[29-[[2-(acetylamino)-2-deoxy-beta-D-galactopyra nosyl]oxy]-14,14-bis[[3-[[3-[[5-[[2-(acetylamino)-2-deoxy-b eta-D-galactopyranosyl]oxy]-1-oxopentyl]amino]propyl]amino] -3-oxopropoxy]methyl]-1,12,19,25-tetraoxo-16-oxa-13,20,24-t riazanonacos-1-yl]-4-hydroxy-2-pyrrolidinyl)methyl ester
cagtaaatatattgagccatt

SEQ ID NO: 5842 - RNA, 21 nt, synthetic construct
  source 1..21: mol_type = other RNA
  modified_base 1: mod_base = OTHER; note = 2'-O-methyluridine-3'-phosphorothioate
  modified_base 2: mod_base = OTHER; note = 2'-O-methylguanosine-3'-phosphorothioate
  modified_base 3: mod_base = OTHER; note = 2'-O-methylguanosine-3'-phosphate
  modified_base 4: mod_base = OTHER; note = 2'-O-methylcytidine-3'-phosphate
  modified_base 5: mod_base = OTHER; note = 2'-O-methylcytidine-3'-phosphate
  modified_base 6: mod_base = OTHER; note = 2'-O-methyluridine-3'-phosphate
  modified_base 7: mod_base = OTHER; note = 2'-deoxy-2'-fluorocytidine-3'-phosphate
  modified_base 8: mod_base = OTHER; note = 2'-O-methyladenosine-3'-phosphate
  modified_base 9: mod_base = OTHER; note = 2'-deoxy-2'-fluorouridine-3'-phosphate
  modified_base 10: mod_base = OTHER; note = 2'-deoxy-2'-fluorouridine-3'-phosphate
  modified_base 11: mod_base = OTHER; note = 2'-deoxy-2'-fluorouridine-3'-phosphate
  modified_base 12: mod_base = OTHER; note = 2'-O-methyluridine-3'-phosphate
  modified_base 13: mod_base = OTHER; note = 2'-O-methyluridine-3'-phosphate
  modified_base 14: mod_base = OTHER; note = 2'-O-methylcytidine-3'-phosphate
  modified_base 15: mod_base = OTHER; note = 2'-O-methyluridine-3'-phosphate
  modified_base 16: mod_base = OTHER; note = 2'-O-methylcytidine-3'-phosphate
  modified_base 17: mod_base = OTHER; note = 2'-O-methyluridine-3'-phosphate
  modified_base 18: mod_base = OTHER; note = 2'-O-methyluridine-3'-phosphate
  modified_base 19: mod_base = OTHER; note = 2'-O-methyluridine-3'-phosphate
  modified_base 20: mod_base = OTHER; note = 2'-O-methyluridine-3'-phosphate
  modified_base 21: mod_base = OTHER; note = 2'-O-methyluridine-3'-phosphate ((2S,4R)-1-[29-[[2-(acetylamino)-2-deoxy-beta-D-galactopyra nosyl]oxy]-14,14-bis[[3-[[3-[[5-[[2-(acetylamino)-2-deoxy-b eta-D-galactopyranosyl]oxy]-1-oxopentyl]amino]propyl]amino] -3-oxopropoxy]methyl]-1,12,19,25-tetraoxo-16-oxa-13,20,24-t riazanonacos-1-yl]-4-hydroxy-2-pyrrolidinyl)methyl ester
tggcctcatttttctcttttt

SEQ ID NO: 5843 - RNA, 21 nt, synthetic construct
  source 1..21: mol_type = other RNA
  modified_base 1: mod_base = OTHER; note = 2'-O-methyluridine-3'-phosphorothioate
  modified_base 2: mod_base = OTHER; note = 2'-O-methyluridine-3'-phosphorothioate
  modified_base 3: mod_base = OTHER; note = 2'-O-methyluridine-3'-phosphate
  modified_base 4: mod_base = OTHER; note = 2'-O-methyluridine-3'-phosphate
  modified_base 5: mod_base = OTHER; note = 2'-O-methylguanosine-3'-phosphate
  modified_base 6: mod_base = OTHER; note = 2'-O-methyluridine-3'-phosphate
  modified_base 7: mod_base = OTHER; note = 2'-deoxy-2'-fluoroguanosine-3'-phosphate
  modified_base 8: mod_base = OTHER; note = 2'-O-methyladenosine-3'-phosphate
  modified_base 9: mod_base = OTHER; note = 2'-deoxy-2'-fluoroadenosine-3'-phosphate
  modified_base 10: mod_base = OTHER; note = 2'-deoxy-2'-fluoroguanosine-3'-phosphate
  modified_base 11: mod_base = OTHER; note = 2'-deoxy-2'-fluorocytidine-3'-phosphate
  modified_base 12: mod_base = OTHER; note = 2'-O-methyladenosine-3'-phosphate
  modified_base 13: mod_base = OTHER; note = 2'-O-methylguanosine-3'-phosphate
  modified_base 14: mod_base = OTHER; note = 2'-O-methylcytidine-3'-phosphate
  modified_base 15: mod_base = OTHER; note = 2'-O-methyluridine-3'-phosphate
  modified_base 16: mod_base = OTHER; note = 2'-O-methyladenosine-3'-phosphate
  modified_base 17: mod_base = OTHER; note = 2'-O-methyluridine-3'-phosphate
  modified_base 18: mod_base = OTHER; note = 2'-O-methyladenosine-3'-phosphate
  modified_base 19: mod_base = OTHER; note = 2'-O-methylcytidine-3'-phosphate
  modified_base 20: mod_base = OTHER; note = 2'-O-methylguanosine-3'-phosphate
  modified_base 21: mod_base = OTHER; note = 2'-O-methyluridine-3'-phosphate ((2S,4R)-1-[29-[[2-(acetylamino)-2-deoxy-beta-D-galactopyra nosyl]oxy]-14,14-bis[[3-[[3-[[5-[[2-(acetylamino)-2-deoxy-b eta-D-galactopyranosyl]oxy]-1-oxopentyl]amino]propyl]amino] -3-oxopropoxy]methyl]-1,12,19,25-tetraoxo-16-oxa-13,20,24-t riazanonacos-1-yl]-4-hydroxy-2-pyrrolidinyl)methyl ester
ttttgtgaagcagctatacgt

SEQ ID NO: 5844 - RNA, 21 nt, synthetic construct
  source 1..21: mol_type = other RNA
  modified_base 1: mod_base = OTHER; note = 2'-O-methyluridine-3'-phosphorothioate
  modified_base 2: mod_base = OTHER; note = 2'-O-methylguanosine-3'-phosphorothioate
  modified_base 3: mod_base = OTHER; note = 2'-O-methylguanosine-3'-phosphate
  modified_base 4: mod_base = OTHER; note = 2'-O-methylcytidine-3'-phosphate
  modified_base 5: mod_base = OTHER; note = 2'-O-methyladenosine-3'-phosphate
  modified_base 6: mod_base = OTHER; note = 2'-O-methyluridine-3'-phosphate
  modified_base 7: mod_base = OTHER; note = 2'-deoxy-2'-fluoroadenosine-3'-phosphate
  modified_base 8: mod_base = OTHER; note = 2'-O-methylcytidine-3'-phosphate
  modified_base 9: mod_base = OTHER; note = 2'-deoxy-2'-fluoroadenosine-3'-phosphate
  modified_base 10: mod_base = OTHER; note = 2'-deoxy-2'-fluorouridine-3'-phosphate
  modified_base 11: mod_base = OTHER; note = 2'-deoxy-2'-fluoroguanosine-3'-phosphate
  modified_base 12: mod_base = OTHER; note = 2'-O-methyluridine-3'-phosphate
  modified_base 13: mod_base = OTHER; note = 2'-O-methyladenosine-3'-phosphate
  modified_base 14: mod_base = OTHER; note = 2'-O-methyluridine-3'-phosphate
  modified_base 15: mod_base = OTHER; note = 2'-O-methyluridine-3'-phosphate
  modified_base 16: mod_base = OTHER; note = 2'-O-methyluridine-3'-phosphate
  modified_base 17: mod_base = OTHER; note = 2'-O-methyladenosine-3'-phosphate
  modified_base 18: mod_base = OTHER; note = 2'-O-methyladenosine-3'-phosphate
  modified_base 19: mod_base = OTHER; note = 2'-O-methyladenosine-3'-phosphate
  modified_base 20: mod_base = OTHER; note = 2'-O-methylguanosine-3'-phosphate
  modified_base 21: mod_base = OTHER; note = 2'-O-methyluridine-3'-phosphate ((2S,4R)-1-[29-[[2-(acetylamino)-2-deoxy-beta-D-galactopyra nosyl]oxy]-14,14-bis[[3-[[3-[[5-[[2-(acetylamino)-2-deoxy-b eta-D-galactopyranosyl]oxy]-1-oxopentyl]amino]propyl]amino] -3-oxopropoxy]methyl]-1,12,19,25-tetraoxo-16-oxa-13,20,24-t riazanonacos-1-yl]-4-hydroxy-2-pyrrolidinyl)methyl ester
tggcatacatgtatttaaagt

SEQ ID NO: 5845 - RNA, 21 nt, synthetic construct
  source 1..21: mol_type = other RNA
  modified_base 1: mod_base = OTHER; note = 2'-O-methyluridine-3'-phosphorothioate
  modified_base 2: mod_base = OTHER; note = 2'-O-methylguanosine-3'-phosphorothioate
  modified_base 3: mod_base = OTHER; note = 2'-O-methyluridine-3'-phosphate
  modified_base 4: mod_base = OTHER; note = 2'-O-methyladenosine-3'-phosphate
  modified_base 5: mod_base = OTHER; note = 2'-O-methylguanosine-3'-phosphate
  modified_base 6: mod_base = OTHER; note = 2'-O-methyladenosine-3'-phosphate
  modified_base 7: mod_base = OTHER; note = 2'-deoxy-2'-fluoroguanosine-3'-phosphate
  modified_base 8: mod_base = OTHER; note = 2'-O-methyluridine-3'-phosphate
  modified_base 9: mod_base = OTHER; note = 2'-deoxy-2'-fluoroguanosine-3'-phosphate
  modified_base 10: mod_base = OTHER; note = 2'-deoxy-2'-fluorouridine-3'-phosphate
  modified_base 11: mod_base = OTHER; note = 2'-deoxy-2'-fluorouridine-3'-phosphate
  modified_base 12: mod_base = OTHER; note = 2'-O-methyluridine-3'-phosphate
  modified_base 13: mod_base = OTHER; note = 2'-O-methyluridine-3'-phosphate
  modified_base 14: mod_base = OTHER; note = 2'-O-methyluridine-3'-phosphate
  modified_base 15: mod_base = OTHER; note = 2'-O-methyluridine-3'-phosphate
  modified_base 16: mod_base = OTHER; note = 2'-O-methyluridine-3'-phosphate
  modified_base 17: mod_base = OTHER; note = 2'-O-methyluridine-3'-phosphate
  modified_base 18: mod_base = OTHER; note = 2'-O-methyladenosine-3'-phosphate
  modified_base 19: mod_base = OTHER; note = 2'-O-methylcytidine-3'-phosphate
  modified_base 20: mod_base = OTHER; note = 2'-O-methyladenosine-3'-phosphate
  modified_base 21: mod_base = OTHER; note = 2'-O-methyluridine-3'-phosphate ((2S,4R)-1-[29-[[2-(acetylamino)-2-deoxy-beta-D-galactopyra nosyl]oxy]-14,14-bis[[3-[[3-[[5-[[2-(acetylamino)-2-deoxy-b eta-D-galactopyranosyl]oxy]-1-oxopentyl]amino]propyl]amino] -3-oxopropoxy]methyl]-1,12,19,25-tetraoxo-16-oxa-13,20,24-t riazanonacos-1-yl]-4-hydroxy-2-pyrrolidinyl)methyl ester
tgtagagtgttttttttacat

SEQ ID NO: 5846 - RNA, 21 nt, synthetic construct
  source 1..21: mol_type = other RNA
  modified_base 1: mod_base = OTHER; note = 2'-O-methyluridine-3'-phosphorothioate
  modified_base 2: mod_base = OTHER; note = 2'-O-methyladenosine-3'-phosphorothioate
  modified_base 3: mod_base = OTHER; note = 2'-O-methylcytidine-3'-phosphate
  modified_base 4: mod_base = OTHER; note = 2'-O-methyladenosine-3'-phosphate
  modified_base 5: mod_base = OTHER; note = 2'-O-methylcytidine-3'-phosphate
  modified_base 6: mod_base = OTHER; note = 2'-O-methyluridine-3'-phosphate
  modified_base 7: mod_base = OTHER; note = 2'-deoxy-2'-fluorouridine-3'-phosphate
  modified_base 8: mod_base = OTHER; note = 2'-O-methyluridine-3'-phosphate
  modified_base 9: mod_base = OTHER; note = 2'-deoxy-2'-fluorouridine-3'-phosphate
  modified_base 10: mod_base = OTHER; note = 2'-deoxy-2'-fluoroadenosine-3'-phosphate
  modified_base 11: mod_base = OTHER; note = 2'-deoxy-2'-fluoroadenosine-3'-phosphate
  modified_base 12: mod_base = OTHER; note = 2'-O-methylcytidine-3'-phosphate
  modified_base 13: mod_base = OTHER; note = 2'-O-methyluridine-3'-phosphate
  modified_base 14: mod_base = OTHER; note = 2'-O-methyluridine-3'-phosphate
  modified_base 15: mod_base = OTHER; note = 2'-O-methyladenosine-3'-phosphate
  modified_base 16: mod_base = OTHER; note = 2'-O-methylguanosine-3'-phosphate
  modified_base 17: mod_base = OTHER; note = 2'-O-methylcytidine-3'-phosphate
  modified_base 18: mod_base = OTHER; note = 2'-O-methyladenosine-3'-phosphate
  modified_base 19: mod_base = OTHER; note = 2'-O-methyluridine-3'-phosphate
  modified_base 20: mod_base = OTHER; note = 2'-O-methylguanosine-3'-phosphate
  modified_base 21: mod_base = OTHER; note = 2'-O-methyluridine-3'-phosphate ((2S,4R)-1-[29-[[2-(acetylamino)-2-deoxy-beta-D-galactopyra nosyl]oxy]-14,14-bis[[3-[[3-[[5-[[2-(acetylamino)-2-deoxy-b eta-D-galactopyranosyl]oxy]-1-oxopentyl]amino]propyl]amino] -3-oxopropoxy]methyl]-1,12,19,25-tetraoxo-16-oxa-13,20,24-t riazanonacos-1-yl]-4-hydroxy-2-pyrrolidinyl)methyl ester
tacacttttaacttagcatgt

SEQ ID NO: 5847 - RNA, 21 nt, synthetic construct
  source 1..21: mol_type = other RNA
  modified_base 1: mod_base = OTHER; note = 2'-O-methylguanosine-3'-phosphorothioate
  modified_base 2: mod_base = OTHER; note = 2'-O-methyluridine-3'-phosphorothioate
  modified_base 3: mod_base = OTHER; note = 2'-O-methylguanosine-3'-phosphate
  modified_base 4: mod_base = OTHER; note = 2'-O-methyluridine-3'-phosphate
  modified_base 5: mod_base = OTHER; note = 2'-O-methyluridine-3'-phosphate
  modified_base 6: mod_base = OTHER; note = 2'-O-methylguanosine-3'-phosphate
  modified_base 7: mod_base = OTHER; note = 2'-deoxy-2'-fluoroadenosine-3'-phosphate
  modified_base 8: mod_base = OTHER; note = 2'-O-methyladenosine-3'-phosphate
  modified_base 9: mod_base = OTHER; note = 2'-deoxy-2'-fluoroguanosine-3'-phosphate
  modified_base 10: mod_base = OTHER; note = 2'-deoxy-2'-fluorouridine-3'-phosphate
  modified_base 11: mod_base = OTHER; note = 2'-deoxy-2'-fluoroadenosine-3'-phosphate
  modified_base 12: mod_base = OTHER; note = 2'-O-methyluridine-3'-phosphate
  modified_base 13: mod_base = OTHER; note = 2'-O-methyluridine-3'-phosphate
  modified_base 14: mod_base = OTHER; note = 2'-O-methyladenosine-3'-phosphate
  modified_base 15: mod_base = OTHER; note = 2'-O-methylcytidine-3'-phosphate
  modified_base 16: mod_base = OTHER; note = 2'-O-methyluridine-3'-phosphate
  modified_base 17: mod_base = OTHER; note = 2'-O-methylguanosine-3'-phosphate
  modified_base 18: mod_base = OTHER; note = 2'-O-methyluridine-3'-phosphate
  modified_base 19: mod_base = OTHER; note = 2'-O-methyladenosine-3'-phosphate
  modified_base 20: mod_base = OTHER; note = 2'-O-methylguanosine-3'-phosphate
  modified_base 21: mod_base = OTHER; note = 2'-O-methyluridine-3'-phosphate ((2S,4R)-1-[29-[[2-(acetylamino)-2-deoxy-beta-D-galactopyra nosyl]oxy]-14,14-bis[[3-[[3-[[5-[[2-(acetylamino)-2-deoxy-b eta-D-galactopyranosyl]oxy]-1-oxopentyl]amino]propyl]amino] -3-oxopropoxy]methyl]-1,12,19,25-tetraoxo-16-oxa-13,20,24-t riazanonacos-1-yl]-4-hydroxy-2-pyrrolidinyl)methyl ester
gtgttgaagtattactgtagt

SEQ ID NO: 5848 - RNA, 21 nt, synthetic construct
  source 1..21: mol_type = other RNA
  modified_base 1: mod_base = OTHER; note = 2'-O-methylguanosine-3'-phosphorothioate
  modified_base 2: mod_base = OTHER; note = 2'-O-methyluridine-3'-phosphorothioate
  modified_base 3: mod_base = OTHER; note = 2'-O-methyladenosine-3'-phosphate
  modified_base 4: mod_base = OTHER; note = 2'-O-methylguanosine-3'-phosphate
  modified_base 5: mod_base = OTHER; note = 2'-O-methyladenosine-3'-phosphate
  modified_base 6: mod_base = OTHER; note = 2'-O-methyluridine-3'-phosphate
  modified_base 7: mod_base = OTHER; note = 2'-deoxy-2'-fluorocytidine-3'-phosphate
  modified_base 8: mod_base = OTHER; note = 2'-O-methyladenosine-3'-phosphate
  modified_base 9: mod_base = OTHER; note = 2'-deoxy-2'-fluoroadenosine-3'-phosphate
  modified_base 10: mod_base = OTHER; note = 2'-deoxy-2'-fluoroguanosine-3'-phosphate
  modified_base 11: mod_base = OTHER; note = 2'-deoxy-2'-fluorouridine-3'-phosphate
  modified_base 12: mod_base = OTHER; note = 2'-O-methyluridine-3'-phosphate
  modified_base 13: mod_base = OTHER; note = 2'-O-methyluridine-3'-phosphate
  modified_base 14: mod_base = OTHER; note = 2'-O-methylguanosine-3'-phosphate
  modified_base 15: mod_base = OTHER; note = 2'-O-methyluridine-3'-phosphate
  modified_base 16: mod_base = OTHER; note = 2'-O-methylcytidine-3'-phosphate
  modified_base 17: mod_base = OTHER; note = 2'-O-methyluridine-3'-phosphate
  modified_base 18: mod_base = OTHER; note = 2'-O-methyluridine-3'-phosphate
  modified_base 19: mod_base = OTHER; note = 2'-O-methylcytidine-3'-phosphate
  modified_base 20: mod_base = OTHER; note = 2'-O-methylcytidine-3'-phosphate
  modified_base 21: mod_base = OTHER; note = 2'-O-methyluridine-3'-phosphate ((2S,4R)-1-[29-[[2-(acetylamino)-2-deoxy-beta-D-galactopyra nosyl]oxy]-14,14-bis[[3-[[3-[[5-[[2-(acetylamino)-2-deoxy-b eta-D-galactopyranosyl]oxy]-1-oxopentyl]amino]propyl]amino] -3-oxopropoxy]methyl]-1,12,19,25-tetraoxo-16-oxa-13,20,24-t riazanonacos-1-yl]-4-hydroxy-2-pyrrolidinyl)methyl ester
gtagatcaagtttgtcttcct

SEQ ID NO: 5849 - RNA, 21 nt, synthetic construct
  source 1..21: mol_type = other RNA
  modified_base 1: mod_base = OTHER; note = 2'-O-methylcytidine-3'-phosphorothioate
  modified_base 2: mod_base = OTHER; note = 2'-O-methyluridine-3'-phosphorothioate
  modified_base 3: mod_base = OTHER; note = 2'-O-methyluridine-3'-phosphate
  modified_base 4: mod_base = OTHER; note = 2'-O-methylcytidine-3'-phosphate
  modified_base 5: mod_base = OTHER; note = 2'-O-methylcytidine-3'-phosphate
  modified_base 6: mod_base = OTHER; note = 2'-O-methylguanosine-3'-phosphate
  modified_base 7: mod_base = OTHER; note = 2'-deoxy-2'-fluorocytidine-3'-phosphate
  modified_base 8: mod_base = OTHER; note = 2'-O-methyladenosine-3'-phosphate
  modified_base 9: mod_base = OTHER; note = 2'-deoxy-2'-fluorocytidine-3'-phosphate
  modified_base 10: mod_base = OTHER; note = 2'-deoxy-2'-fluorouridine-3'-phosphate
  modified_base 11: mod_base = OTHER; note = 2'-deoxy-2'-fluoroadenosine-3'-phosphate
  modified_base 12: mod_base = OTHER; note = 2'-O-methyladenosine-3'-phosphate
  modified_base 13: mod_base = OTHER; note = 2'-O-methylguanosine-3'-phosphate
  modified_base 14: mod_base = OTHER; note = 2'-O-methyladenosine-3'-phosphate
  modified_base 15: mod_base = OTHER; note = 2'-O-methyluridine-3'-phosphate
  modified_base 16: mod_base = OTHER; note = 2'-O-methylguanosine-3'-phosphate
  modified_base 17: mod_base = OTHER; note = 2'-O-methyluridine-3'-phosphate
  modified_base 18: mod_base = OTHER; note = 2'-O-methylguanosine-3'-phosphate
  modified_base 19: mod_base = OTHER; note = 2'-O-methyladenosine-3'-phosphate
  modified_base 20: mod_base = OTHER; note = 2'-O-methylguanosine-3'-phosphate
  modified_base 21: mod_base = OTHER; note = 2'-O-methyluridine-3'-phosphate ((2S,4R)-1-[29-[[2-(acetylamino)-2-deoxy-beta-D-galactopyra nosyl]oxy]-14,14-bis[[3-[[3-[[5-[[2-(acetylamino)-2-deoxy-b eta-D-galactopyranosyl]oxy]-1-oxopentyl]amino]propyl]amino] -3-oxopropoxy]methyl]-1,12,19,25-tetraoxo-16-oxa-13,20,24-t riazanonacos-1-yl]-4-hydroxy-2-pyrrolidinyl)methyl ester
cttccgcactaagatgtgagt

SEQ ID NO: 5850 - RNA, 21 nt, synthetic construct
  source 1..21: mol_type = other RNA
  modified_base 1: mod_base = OTHER; note = 2'-O-methyluridine-3'-phosphorothioate
  modified_base 2: mod_base = OTHER; note = 2'-O-methylguanosine-3'-phosphorothioate
  modified_base 3: mod_base = OTHER; note = 2'-O-methyladenosine-3'-phosphate
  modified_base 4: mod_base = OTHER; note = 2'-O-methylguanosine-3'-phosphate
  modified_base 5: mod_base = OTHER; note = 2'-O-methylguanosine-3'-phosphate
  modified_base 6: mod_base = OTHER; note = 2'-O-methyladenosine-3'-phosphate
  modified_base 7: mod_base = OTHER; note = 2'-deoxy-2'-fluoroadenosine-3'-phosphate
  modified_base 8: mod_base = OTHER; note = 2'-O-methyladenosine-3'-phosphate
  modified_base 9: mod_base = OTHER; note = 2'-deoxy-2'-fluorouridine-3'-phosphate
  modified_base 10: mod_base = OTHER; note = 2'-deoxy-2'-fluorouridine-3'-phosphate
  modified_base 11: mod_base = OTHER; note = 2'-deoxy-2'-fluoroguanosine-3'-phosphate
  modified_base 12: mod_base = OTHER; note = 2'-O-methyluridine-3'-phosphate
  modified_base 13: mod_base = OTHER; note = 2'-O-methylguanosine-3'-phosphate
  modified_base 14: mod_base = OTHER; note = 2'-O-methyladenosine-3'-phosphate
  modified_base 15: mod_base = OTHER; note = 2'-O-methyluridine-3'-phosphate
  modified_base 16: mod_base = OTHER; note = 2'-O-methyluridine-3'-phosphate
  modified_base 17: mod_base = OTHER; note = 2'-O-methyluridine-3'-phosphate
  modified_base 18: mod_base = OTHER; note = 2'-O-methylguanosine-3'-phosphate
  modified_base 19: mod_base = OTHER; note = 2'-O-methyluridine-3'-phosphate
  modified_base 20: mod_base = OTHER; note = 2'-O-methyluridine-3'-phosphate
  modified_base 21: mod_base = OTHER; note = 2'-O-methyluridine-3'-phosphate ((2S,4R)-1-[29-[[2-(acetylamino)-2-deoxy-beta-D-galactopyra nosyl]oxy]-14,14-bis[[3-[[3-[[5-[[2-(acetylamino)-2-deoxy-b eta-D-galactopyranosyl]oxy]-1-oxopentyl]amino]propyl]amino] -3-oxopropoxy]methyl]-1,12,19,25-tetraoxo-16-oxa-13,20,24-t riazanonacos-1-yl]-4-hydroxy-2-pyrrolidinyl)methyl ester
tgaggaaattgtgatttgttt

SEQ ID NO: 5851 - RNA, 21 nt, synthetic construct
  source 1..21: mol_type = other RNA
  modified_base 1: mod_base = OTHER; note = 2'-O-methylcytidine-3'-phosphorothioate
  modified_base 2: mod_base = OTHER; note = 2'-O-methyladenosine-3'-phosphorothioate
  modified_base 3: mod_base = OTHER; note = 2'-O-methylcytidine-3'-phosphate
  modified_base 4: mod_base = OTHER; note = 2'-O-methyladenosine-3'-phosphate
  modified_base 5: mod_base = OTHER; note = 2'-O-methyladenosine-3'-phosphate
  modified_base 6: mod_base = OTHER; note = 2'-O-methyladenosine-3'-phosphate
  modified_base 7: mod_base = OTHER; note = 2'-deoxy-2'-fluorouridine-3'-phosphate
  modified_base 8: mod_base = OTHER; note = 2'-O-methylguanosine-3'-phosphate
  modified_base 9: mod_base = OTHER; note = 2'-deoxy-2'-fluoroadenosine-3'-phosphate
  modified_base 10: mod_base = OTHER; note = 2'-deoxy-2'-fluoroadenosine-3'-phosphate
  modified_base 11: mod_base = OTHER; note = 2'-deoxy-2'-fluorouridine-3'-phosphate
  modified_base 12: mod_base = OTHER; note = 2'-O-methyluridine-3'-phosphate
  modified_base 13: mod_base = OTHER; note = 2'-O-methyladenosine-3'-phosphate
  modified_base 14: mod_base = OTHER; note = 2'-O-methylcytidine-3'-phosphate
  modified_base 15: mod_base = OTHER; note = 2'-O-methyladenosine-3'-phosphate
  modified_base 16: mod_base = OTHER; note = 2'-O-methylcytidine-3'-phosphate
  modified_base 17: mod_base = OTHER; note = 2'-O-methyladenosine-3'-phosphate
  modified_base 18: mod_base = OTHER; note = 2'-O-methyluridine-3'-phosphate
  modified_base 19: mod_base = OTHER; note = 2'-O-methyluridine-3'-phosphate
  modified_base 20: mod_base = OTHER; note = 2'-O-methyluridine-3'-phosphate
  modified_base 21: mod_base = OTHER; note = 2'-O-methyluridine-3'-phosphate ((2S,4R)-1-[29-[[2-(acetylamino)-2-deoxy-beta-D-galactopyra nosyl]oxy]-14,14-bis[[3-[[3-[[5-[[2-(acetylamino)-2-deoxy-b eta-D-galactopyranosyl]oxy]-1-oxopentyl]amino]propyl]amino] -3-oxopropoxy]methyl]-1,12,19,25-tetraoxo-16-oxa-13,20,24-t riazanonacos-1-yl]-4-hydroxy-2-pyrrolidinyl)methyl ester
cacaaatgaattacacatttt

SEQ ID NO: 5852 - RNA, 21 nt, synthetic construct
  source 1..21: mol_type = other RNA
  modified_base 1: mod_base = OTHER; note = 2'-O-methyluridine-3'-phosphorothioate
  modified_base 2: mod_base = OTHER; note = 2'-O-methyluridine-3'-phosphorothioate
  modified_base 3: mod_base = OTHER; note = 2'-O-methylcytidine-3'-phosphate
  modified_base 4: mod_base = OTHER; note = 2'-O-methyluridine-3'-phosphate
  modified_base 5: mod_base = OTHER; note = 2'-O-methyladenosine-3'-phosphate
  modified_base 6: mod_base = OTHER; note = 2'-O-methyluridine-3'-phosphate
  modified_base 7: mod_base = OTHER; note = 2'-deoxy-2'-fluorocytidine-3'-phosphate
  modified_base 8: mod_base = OTHER; note = 2'-O-methyladenosine-3'-phosphate
  modified_base 9: mod_base = OTHER; note = 2'-deoxy-2'-fluorouridine-3'-phosphate
  modified_base 10: mod_base = OTHER; note = 2'-deoxy-2'-fluorouridine-3'-phosphate
  modified_base 11: mod_base = OTHER; note = 2'-deoxy-2'-fluorouridine-3'-phosphate
  modified_base 12: mod_base = OTHER; note = 2'-O-methyluridine-3'-phosphate
  modified_base 13: mod_base = OTHER; note = 2'-O-methylguanosine-3'-phosphate
  modified_base 14: mod_base = OTHER; note = 2'-O-methyladenosine-3'-phosphate
  modified_base 15: mod_base = OTHER; note = 2'-O-methyladenosine-3'-phosphate
  modified_base 16: mod_base = OTHER; note = 2'-O-methyladenosine-3'-phosphate
  modified_base 17: mod_base = OTHER; note = 2'-O-methylcytidine-3'-phosphate
  modified_base 18: mod_base = OTHER; note = 2'-O-methyladenosine-3'-phosphate
  modified_base 19: mod_base = OTHER; note = 2'-O-methylcytidine-3'-phosphate
  modified_base 20: mod_base = OTHER; note = 2'-O-methyluridine-3'-phosphate
  modified_base 21: mod_base = OTHER; note = 2'-O-methyluridine-3'-phosphate ((2S,4R)-1-[29-[[2-(acetylamino)-2-deoxy-beta-D-galactopyra nosyl]oxy]-14,14-bis[[3-[[3-[[5-[[2-(acetylamino)-2-deoxy-b eta-D-galactopyranosyl]oxy]-1-oxopentyl]amino]propyl]amino] -3-oxopropoxy]methyl]-1,12,19,25-tetraoxo-16-oxa-13,20,24-t riazanonacos-1-yl]-4-hydroxy-2-pyrrolidinyl)methyl ester
ttctatcattttgaaacactt

SEQ ID NO: 5853 - RNA, 21 nt, synthetic construct
  source 1..21: mol_type = other RNA
  modified_base 1: mod_base = OTHER; note = 2'-O-methyladenosine-3'-phosphorothioate
  modified_base 2: mod_base = OTHER; note = 2'-O-methylcytidine-3'-phosphorothioate
  modified_base 3: mod_base = OTHER; note = 2'-O-methyladenosine-3'-phosphate
  modified_base 4: mod_base = OTHER; note = 2'-O-methylcytidine-3'-phosphate
  modified_base 5: mod_base = OTHER; note = 2'-O-methyluridine-3'-phosphate
  modified_base 6: mod_base = OTHER; note = 2'-O-methylguanosine-3'-phosphate
  modified_base 7: mod_base = OTHER; note = 2'-deoxy-2'-fluorouridine-3'-phosphate
  modified_base 8: mod_base = OTHER; note = 2'-O-methyladenosine-3'-phosphate
  modified_base 9: mod_base = OTHER; note = 2'-deoxy-2'-fluorouridine-3'-phosphate
  modified_base 10: mod_base = OTHER; note = 2'-deoxy-2'-fluoroadenosine-3'-phosphate
  modified_base 11: mod_base = OTHER; note = 2'-deoxy-2'-fluorouridine-3'-phosphate
  modified_base 12: mod_base = OTHER; note = 2'-O-methyladenosine-3'-phosphate
  modified_base 13: mod_base = OTHER; note = 2'-O-methyluridine-3'-phosphate
  modified_base 14: mod_base = OTHER; note = 2'-O-methyluridine-3'-phosphate
  modified_base 15: mod_base = OTHER; note = 2'-O-methyluridine-3'-phosphate
  modified_base 16: mod_base = OTHER; note = 2'-O-methylcytidine-3'-phosphate
  modified_base 17: mod_base = OTHER; note = 2'-O-methyluridine-3'-phosphate
  modified_base 18: mod_base = OTHER; note = 2'-O-methyluridine-3'-phosphate
  modified_base 19: mod_base = OTHER; note = 2'-O-methylguanosine-3'-phosphate
  modified_base 20: mod_base = OTHER; note = 2'-O-methylcytidine-3'-phosphate
  modified_base 21: mod_base = OTHER; note = 2'-O-methyluridine-3'-phosphate ((2S,4R)-1-[29-[[2-(acetylamino)-2-deoxy-beta-D-galactopyra nosyl]oxy]-14,14-bis[[3-[[3-[[5-[[2-(acetylamino)-2-deoxy-b eta-D-galactopyranosyl]oxy]-1-oxopentyl]amino]propyl]amino] -3-oxopropoxy]methyl]-1,12,19,25-tetraoxo-16-oxa-13,20,24-t riazanonacos-1-yl]-4-hydroxy-2-pyrrolidinyl)methyl ester
acactgtatatatttcttgct

SEQ ID NO: 5854 - RNA, 21 nt, synthetic construct
  source 1..21: mol_type = other RNA
  modified_base 1: mod_base = OTHER; note = 2'-O-methyluridine-3'-phosphorothioate
  modified_base 2: mod_base = OTHER; note = 2'-O-methylguanosine-3'-phosphorothioate
  modified_base 3: mod_base = OTHER; note = 2'-O-methylcytidine-3'-phosphate
  modified_base 4: mod_base = OTHER; note = 2'-O-methylcytidine-3'-phosphate
  modified_base 5: mod_base = OTHER; note = 2'-O-methyladenosine-3'-phosphate
  modified_base 6: mod_base = OTHER; note = 2'-O-methyluridine-3'-phosphate
  modified_base 7: mod_base = OTHER; note = 2'-deoxy-2'-fluoroadenosine-3'-phosphate
  modified_base 8: mod_base = OTHER; note = 2'-O-methyladenosine-3'-phosphate
  modified_base 9: mod_base = OTHER; note = 2'-deoxy-2'-fluorouridine-3'-phosphate
  modified_base 10: mod_base = OTHER; note = 2'-deoxy-2'-fluoroguanosine-3'-phosphate
  modified_base 11: mod_base = OTHER; note = 2'-deoxy-2'-fluoroguanosine-3'-phosphate
  modified_base 12: mod_base = OTHER; note = 2'-O-methyluridine-3'-phosphate
  modified_base 13: mod_base = OTHER; note = 2'-O-methyladenosine-3'-phosphate
  modified_base 14: mod_base = OTHER; note = 2'-O-methyladenosine-3'-phosphate
  modified_base 15: mod_base = OTHER; note = 2'-O-methyladenosine-3'-phosphate
  modified_base 16: mod_base = OTHER; note = 2'-O-methylguanosine-3'-phosphate
  modified_base 17: mod_base = OTHER; note = 2'-O-methylguanosine-3'-phosphate
  modified_base 18: mod_base = OTHER; note = 2'-O-methyladenosine-3'-phosphate
  modified_base 19: mod_base = OTHER; note = 2'-O-methylcytidine-3'-phosphate
  modified_base 20: mod_base = OTHER; note = 2'-O-methyluridine-3'-phosphate
  modified_base 21: mod_base = OTHER; note = 2'-O-methyluridine-3'-phosphate ((2S,4R)-1-[29-[[2-(acetylamino)-2-deoxy-beta-D-galactopyra nosyl]oxy]-14,14-bis[[3-[[3-[[5-[[2-(acetylamino)-2-deoxy-b eta-D-galactopyranosyl]oxy]-1-oxopentyl]amino]propyl]amino] -3-oxopropoxy]methyl]-1,12,19,25-tetraoxo-16-oxa-13,20,24-t riazanonacos-1-yl]-4-hydroxy-2-pyrrolidinyl)methyl ester
tgccataatggtaaaggactt

SEQ ID NO: 5855 - RNA, 21 nt, synthetic construct
  source 1..21: mol_type = other RNA
  modified_base 1: mod_base = OTHER; note = 2'-O-methylguanosine-3'-phosphorothioate
  modified_base 2: mod_base = OTHER; note = 2'-O-methyladenosine-3'-phosphorothioate
  modified_base 3: mod_base = OTHER; note = 2'-O-methylcytidine-3'-phosphate
  modified_base 4: mod_base = OTHER; note = 2'-O-methyluridine-3'-phosphate
  modified_base 5: mod_base = OTHER; note = 2'-O-methylguanosine-3'-phosphate
  modified_base 6: mod_base = OTHER; note = 2'-O-methyladenosine-3'-phosphate
  modified_base 7: mod_base = OTHER; note = 2'-deoxy-2'-fluorouridine-3'-phosphate
  modified_base 8: mod_base = OTHER; note = 2'-O-methyluridine-3'-phosphate
  modified_base 9: mod_base = OTHER; note = 2'-deoxy-2'-fluoroguanosine-3'-phosphate
  modified_base 10: mod_base = OTHER; note = 2'-deoxy-2'-fluoroadenosine-3'-phosphate
  modified_base 11: mod_base = OTHER; note = 2'-deoxy-2'-fluorouridine-3'-phosphate
  modified_base 12: mod_base = OTHER; note = 2'-O-methyladenosine-3'-phosphate
  modified_base 13: mod_base = OTHER; note = 2'-O-methyluridine-3'-phosphate
  modified_base 14: mod_base = OTHER; note = 2'-O-methyladenosine-3'-phosphate
  modified_base 15: mod_base = OTHER; note = 2'-O-methyluridine-3'-phosphate
  modified_base 16: mod_base = OTHER; note = 2'-O-methyluridine-3'-phosphate
  modified_base 17: mod_base = OTHER; note = 2'-O-methyluridine-3'-phosphate
  modified_base 18: mod_base = OTHER; note = 2'-O-methyladenosine-3'-phosphate
  modified_base 19: mod_base = OTHER; note = 2'-O-methyladenosine-3'-phosphate
  modified_base 20: mod_base = OTHER; note = 2'-O-methylguanosine-3'-phosphate
  modified_base 21: mod_base = OTHER; note = 2'-O-methyluridine-3'-phosphate ((2S,4R)-1-[29-[[2-(acetylamino)-2-deoxy-beta-D-galactopyra nosyl]oxy]-14,14-bis[[3-[[3-[[5-[[2-(acetylamino)-2-deoxy-b eta-D-galactopyranosyl]oxy]-1-oxopentyl]amino]propyl]amino] -3-oxopropoxy]methyl]-1,12,19,25-tetraoxo-16-oxa-13,20,24-t riazanonacos-1-yl]-4-hydroxy-2-pyrrolidinyl)methyl ester
gactgattgatatatttaagt

SEQ ID NO: 5856 - RNA, 21 nt, synthetic construct
  source 1..21: mol_type = other RNA
  modified_base 1: mod_base = OTHER; note = 2'-O-methylcytidine-3'-phosphorothioate
  modified_base 2: mod_base = OTHER; note = 2'-O-methylguanosine-3'-phosphorothioate
  modified_base 3: mod_base = OTHER; note = 2'-O-methyluridine-3'-phosphate
  modified_base 4: mod_base = OTHER; note = 2'-O-methylcytidine-3'-phosphate
  modified_base 5: mod_base = OTHER; note = 2'-O-methylcytidine-3'-phosphate
  modified_base 6: mod_base = OTHER; note = 2'-O-methyladenosine-3'-phosphate
  modified_base 7: mod_base = OTHER; note = 2'-deoxy-2'-fluorouridine-3'-phosphate
  modified_base 8: mod_base = OTHER; note = 2'-O-methylcytidine-3'-phosphate
  modified_base 9: mod_base = OTHER; note = 2'-deoxy-2'-fluorouridine-3'-phosphate
  modified_base 10: mod_base = OTHER; note = 2'-deoxy-2'-fluorouridine-3'-phosphate
  modified_base 11: mod_base = OTHER; note = 2'-deoxy-2'-fluorouridine-3'-phosphate
  modified_base 12: mod_base = OTHER; note = 2'-O-methyladenosine-3'-phosphate
  modified_base 13: mod_base = OTHER; note = 2'-O-methyluridine-3'-phosphate
  modified_base 14: mod_base = OTHER; note = 2'-O-methyluridine-3'-phosphate
  modified_base 15: mod_base = OTHER; note = 2'-O-methyluridine-3'-phosphate
  modified_base 16: mod_base = OTHER; note = 2'-O-methylcytidine-3'-phosphate
  modified_base 17: mod_base = OTHER; note = 2'-O-methyluridine-3'-phosphate
  modified_base 18: mod_base = OTHER; note = 2'-O-methyluridine-3'-phosphate
  modified_base 19: mod_base = OTHER; note = 2'-O-methylcytidine-3'-phosphate
  modified_base 20: mod_base = OTHER; note = 2'-O-methyladenosine-3'-phosphate
  modified_base 21: mod_base = OTHER; note = 2'-O-methyluridine-3'-phosphate ((2S,4R)-1-[29-[[2-(acetylamino)-2-deoxy-beta-D-galactopyra nosyl]oxy]-14,14-bis[[3-[[3-[[5-[[2-(acetylamino)-2-deoxy-b eta-D-galactopyranosyl]oxy]-1-oxopentyl]amino]propyl]amino] -3-oxopropoxy]methyl]-1,12,19,25-tetraoxo-16-oxa-13,20,24-t riazanonacos-1-yl]-4-hydroxy-2-pyrrolidinyl)methyl ester
cgtccatctttatttcttcat

SEQ ID NO: 5857 - RNA, 21 nt, synthetic construct
  source 1..21: mol_type = other RNA
  modified_base 1: mod_base = OTHER; note = 2'-O-methylcytidine-3'-phosphorothioate
  modified_base 2: mod_base = OTHER; note = 2'-O-methyladenosine-3'-phosphorothioate
  modified_base 3: mod_base = OTHER; note = 2'-O-methylguanosine-3'-phosphate
  modified_base 4: mod_base = OTHER; note = 2'-O-methyluridine-3'-phosphate
  modified_base 5: mod_base = OTHER; note = 2'-O-methylguanosine-3'-phosphate
  modified_base 6: mod_base = OTHER; note = 2'-O-methyluridine-3'-phosphate
  modified_base 7: mod_base = OTHER; note = 2'-deoxy-2'-fluoroguanosine-3'-phosphate
  modified_base 8: mod_base = OTHER; note = 2'-O-methyluridine-3'-phosphate
  modified_base 9: mod_base = OTHER; note = 2'-deoxy-2'-fluorocytidine-3'-phosphate
  modified_base 10: mod_base = OTHER; note = 2'-deoxy-2'-fluorocytidine-3'-phosphate
  modified_base 11: mod_base = OTHER; note = 2'-deoxy-2'-fluorouridine-3'-phosphate
  modified_base 12: mod_base = OTHER; note = 2'-O-methyladenosine-3'-phosphate
  modified_base 13: mod_base = OTHER; note = 2'-O-methylcytidine-3'-phosphate
  modified_base 14: mod_base = OTHER; note = 2'-O-methyluridine-3'-phosphate
  modified_base 15: mod_base = OTHER; note = 2'-O-methylcytidine-3'-phosphate
  modified_base 16: mod_base = OTHER; note = 2'-O-methyluridine-3'-phosphate
  modified_base 17: mod_base = OTHER; note = 2'-O-methylguanosine-3'-phosphate
  modified_base 18: mod_base = OTHER; note = 2'-O-methylguanosine-3'-phosphate
  modified_base 19: mod_base = OTHER; note = 2'-O-methyluridine-3'-phosphate
  modified_base 20: mod_base = OTHER; note = 2'-O-methylcytidine-3'-phosphate
  modified_base 21: mod_base = OTHER; note = 2'-O-methyluridine-3'-phosphate ((2S,4R)-1-[29-[[2-(acetylamino)-2-deoxy-beta-D-galactopyra nosyl]oxy]-14,14-bis[[3-[[3-[[5-[[2-(acetylamino)-2-deoxy-b eta-D-galactopyranosyl]oxy]-1-oxopentyl]amino]propyl]amino] -3-oxopropoxy]methyl]-1,12,19,25-tetraoxo-16-oxa-13,20,24-t riazanonacos-1-yl]-4-hydroxy-2-pyrrolidinyl)methyl ester
cagtgtgtcctactctggtct

SEQ ID NO: 5858 - RNA, 21 nt, synthetic construct
  source 1..21: mol_type = other RNA
  modified_base 1: mod_base = OTHER; note = 2'-O-methylguanosine-3'-phosphorothioate
  modified_base 2: mod_base = OTHER; note = 2'-O-methylguanosine-3'-phosphorothioate
  modified_base 3: mod_base = OTHER; note = 2'-O-methyluridine-3'-phosphate
  modified_base 4: mod_base = OTHER; note = 2'-O-methylcytidine-3'-phosphate
  modified_base 5: mod_base = OTHER; note = 2'-O-methyluridine-3'-phosphate
  modified_base 6: mod_base = OTHER; note = 2'-O-methylcytidine-3'-phosphate
  modified_base 7: mod_base = OTHER; note = 2'-deoxy-2'-fluoroadenosine-3'-phosphate
  modified_base 8: mod_base = OTHER; note = 2'-O-methyluridine-3'-phosphate
  modified_base 9: mod_base = OTHER; note = 2'-deoxy-2'-fluorouridine-3'-phosphate
  modified_base 10: mod_base = OTHER; note = 2'-deoxy-2'-fluorouridine-3'-phosphate
  modified_base 11: mod_base = OTHER; note = 2'-deoxy-2'-fluoroadenosine-3'-phosphate
  modified_base 12: mod_base = OTHER; note = 2'-O-methylguanosine-3'-phosphate
  modified_base 13: mod_base = OTHER; note = 2'-O-methyluridine-3'-phosphate
  modified_base 14: mod_base = OTHER; note = 2'-O-methyladenosine-3'-phosphate
  modified_base 15: mod_base = OTHER; note = 2'-O-methylcytidine-3'-phosphate
  modified_base 16: mod_base = OTHER; note = 2'-O-methyladenosine-3'-phosphate
  modified_base 17: mod_base = OTHER; note = 2'-O-methyluridine-3'-phosphate
  modified_base 18: mod_base = OTHER; note = 2'-O-methyladenosine-3'-phosphate
  modified_base 19: mod_base = OTHER; note = 2'-O-methyladenosine-3'-phosphate
  modified_base 20: mod_base = OTHER; note = 2'-O-methylcytidine-3'-phosphate
  modified_base 21: mod_base = OTHER; note = 2'-O-methyluridine-3'-phosphate ((2S,4R)-1-[29-[[2-(acetylamino)-2-deoxy-beta-D-galactopyra nosyl]oxy]-14,14-bis[[3-[[3-[[5-[[2-(acetylamino)-2-deoxy-b eta-D-galactopyranosyl]oxy]-1-oxopentyl]amino]propyl]amino] -3-oxopropoxy]methyl]-1,12,19,25-tetraoxo-16-oxa-13,20,24-t riazanonacos-1-yl]-4-hydroxy-2-pyrrolidinyl)methyl ester
ggtctcatttagtacataact

SEQ ID NO: 5859 - RNA, 21 nt, synthetic construct
  source 1..21: mol_type = other RNA
  modified_base 1: mod_base = OTHER; note = 2'-O-methyladenosine-3'-phosphorothioate
  modified_base 2: mod_base = OTHER; note = 2'-O-methyluridine-3'-phosphorothioate
  modified_base 3: mod_base = OTHER; note = 2'-O-methyladenosine-3'-phosphate
  modified_base 4: mod_base = OTHER; note = 2'-O-methyladenosine-3'-phosphate
  modified_base 5: mod_base = OTHER; note = 2'-O-methylcytidine-3'-phosphate
  modified_base 6: mod_base = OTHER; note = 2'-O-methyladenosine-3'-phosphate
  modified_base 7: mod_base = OTHER; note = 2'-deoxy-2'-fluoroadenosine-3'-phosphate
  modified_base 8: mod_base = OTHER; note = 2'-O-methyluridine-3'-phosphate
  modified_base 9: mod_base = OTHER; note = 2'-deoxy-2'-fluorouridine-3'-phosphate
  modified_base 10: mod_base = OTHER; note = 2'-deoxy-2'-fluorouridine-3'-phosphate
  modified_base 11: mod_base = OTHER; note = 2'-deoxy-2'-fluoroguanosine-3'-phosphate
  modified_base 12: mod_base = OTHER; note = 2'-O-methylcytidine-3'-phosphate
  modified_base 13: mod_base = OTHER; note = 2'-O-methyladenosine-3'-phosphate
  modified_base 14: mod_base = OTHER; note = 2'-O-methylcytidine-3'-phosphate
  modified_base 15: mod_base = OTHER; note = 2'-O-methyluridine-3'-phosphate
  modified_base 16: mod_base = OTHER; note = 2'-O-methyluridine-3'-phosphate
  modified_base 17: mod_base = OTHER; note = 2'-O-methylguanosine-3'-phosphate
  modified_base 18: mod_base = OTHER; note = 2'-O-methylguanosine-3'-phosphate
  modified_base 19: mod_base = OTHER; note = 2'-O-methyluridine-3'-phosphate
  modified_base 20: mod_base = OTHER; note = 2'-O-methylguanosine-3'-phosphate
  modified_base 21: mod_base = OTHER; note = 2'-O-methyluridine-3'-phosphate ((2S,4R)-1-[29-[[2-(acetylamino)-2-deoxy-beta-D-galactopyra nosyl]oxy]-14,14-bis[[3-[[3-[[5-[[2-(acetylamino)-2-deoxy-b eta-D-galactopyranosyl]oxy]-1-oxopentyl]amino]propyl]amino] -3-oxopropoxy]methyl]-1,12,19,25-tetraoxo-16-oxa-13,20,24-t riazanonacos-1-yl]-4-hydroxy-2-pyrrolidinyl)methyl ester
ataacaatttgcacttggtgt

SEQ ID NO: 5860 - RNA, 21 nt, synthetic construct
  source 1..21: mol_type = other RNA
  modified_base 1: mod_base = OTHER; note = 2'-O-methyladenosine-3'-phosphorothioate
  modified_base 2: mod_base = OTHER; note = 2'-O-methylguanosine-3'-phosphorothioate
  modified_base 3: mod_base = OTHER; note = 2'-O-methyluridine-3'-phosphate
  modified_base 4: mod_base = OTHER; note = 2'-O-methyluridine-3'-phosphate
  modified_base 5: mod_base = OTHER; note = 2'-O-methyladenosine-3'-phosphate
  modified_base 6: mod_base = OTHER; note = 2'-O-methyladenosine-3'-phosphate
  modified_base 7: mod_base = OTHER; note = 2'-deoxy-2'-fluorouridine-3'-phosphate
  modified_base 8: mod_base = OTHER; note = 2'-O-methyluridine-3'-phosphate
  modified_base 9: mod_base = OTHER; note = 2'-deoxy-2'-fluoroguanosine-3'-phosphate
  modified_base 10: mod_base = OTHER; note = 2'-deoxy-2'-fluorouridine-3'-phosphate
  modified_base 11: mod_base = OTHER; note = 2'-deoxy-2'-fluorouridine-3'-phosphate
  modified_base 12: mod_base = OTHER; note = 2'-O-methylcytidine-3'-phosphate
  modified_base 13: mod_base = OTHER; note = 2'-O-methyluridine-3'-phosphate
  modified_base 14: mod_base = OTHER; note = 2'-O-methylcytidine-3'-phosphate
  modified_base 15: mod_base = OTHER; note = 2'-O-methyluridine-3'-phosphate
  modified_base 16: mod_base = OTHER; note = 2'-O-methylguanosine-3'-phosphate
  modified_base 17: mod_base = OTHER; note = 2'-O-methyluridine-3'-phosphate
  modified_base 18: mod_base = OTHER; note = 2'-O-methylguanosine-3'-phosphate
  modified_base 19: mod_base = OTHER; note = 2'-O-methyladenosine-3'-phosphate
  modified_base 20: mod_base = OTHER; note = 2'-O-methylguanosine-3'-phosphate
  modified_base 21: mod_base = OTHER; note = 2'-O-methyluridine-3'-phosphate ((2S,4R)-1-[29-[[2-(acetylamino)-2-deoxy-beta-D-galactopyra nosyl]oxy]-14,14-bis[[3-[[3-[[5-[[2-(acetylamino)-2-deoxy-b eta-D-galactopyranosyl]oxy]-1-oxopentyl]amino]propyl]amino] -3-oxopropoxy]methyl]-1,12,19,25-tetraoxo-16-oxa-13,20,24-t riazanonacos-1-yl]-4-hydroxy-2-pyrrolidinyl)methyl ester
agttaattgttctctgtgagt

SEQ ID NO: 5861 - RNA, 21 nt, synthetic construct
  source 1..21: mol_type = other RNA
  modified_base 1: mod_base = OTHER; note = 2'-O-methylcytidine-3'-phosphorothioate
  modified_base 2: mod_base = OTHER; note = 2'-O-methyladenosine-3'-phosphorothioate
  modified_base 3: mod_base = OTHER; note = 2'-O-methyladenosine-3'-phosphate
  modified_base 4: mod_base = OTHER; note = 2'-O-methyladenosine-3'-phosphate
  modified_base 5: mod_base = OTHER; note = 2'-O-methyladenosine-3'-phosphate
  modified_base 6: mod_base = OTHER; note = 2'-O-methylcytidine-3'-phosphate
  modified_base 7: mod_base = OTHER; note = 2'-deoxy-2'-fluoroadenosine-3'-phosphate
  modified_base 8: mod_base = OTHER; note = 2'-O-methyladenosine-3'-phosphate
  modified_base 9: mod_base = OTHER; note = 2'-deoxy-2'-fluorouridine-3'-phosphate
  modified_base 10: mod_base = OTHER; note = 2'-deoxy-2'-fluoroguanosine-3'-phosphate
  modified_base 11: mod_base = OTHER; note = 2'-deoxy-2'-fluoroguanosine-3'-phosphate
  modified_base 12: mod_base = OTHER; note = 2'-O-methyluridine-3'-phosphate
  modified_base 13: mod_base = OTHER; note = 2'-O-methylcytidine-3'-phosphate
  modified_base 14: mod_base = OTHER; note = 2'-O-methyluridine-3'-phosphate
  modified_base 15: mod_base = OTHER; note = 2'-O-methylcytidine-3'-phosphate
  modified_base 16: mod_base = OTHER; note = 2'-O-methyluridine-3'-phosphate
  modified_base 17: mod_base = OTHER; note = 2'-O-methyluridine-3'-phosphate
  modified_base 18: mod_base = OTHER; note = 2'-O-methylcytidine-3'-phosphate
  modified_base 19: mod_base = OTHER; note = 2'-O-methyluridine-3'-phosphate
  modified_base 20: mod_base = OTHER; note = 2'-O-methylguanosine-3'-phosphate
  modified_base 21: mod_base = OTHER; note = 2'-O-methyluridine-3'-phosphate ((2S,4R)-1-[29-[[2-(acetylamino)-2-deoxy-beta-D-galactopyra nosyl]oxy]-14,14-bis[[3-[[3-[[5-[[2-(acetylamino)-2-deoxy-b eta-D-galactopyranosyl]oxy]-1-oxopentyl]amino]propyl]amino] -3-oxopropoxy]methyl]-1,12,19,25-tetraoxo-16-oxa-13,20,24-t riazanonacos-1-yl]-4-hydroxy-2-pyrrolidinyl)methyl ester
caaaacaatggtctcttctgt

SEQ ID NO: 5862 - RNA, 21 nt, synthetic construct
  source 1..21: mol_type = other RNA
  modified_base 1: mod_base = OTHER; note = 2'-O-methylguanosine-3'-phosphorothioate
  modified_base 2: mod_base = OTHER; note = 2'-O-methylcytidine-3'-phosphorothioate
  modified_base 3: mod_base = OTHER; note = 2'-O-methyluridine-3'-phosphate
  modified_base 4: mod_base = OTHER; note = 2'-O-methylguanosine-3'-phosphate
  modified_base 5: mod_base = OTHER; note = 2'-O-methyladenosine-3'-phosphate
  modified_base 6: mod_base = OTHER; note = 2'-O-methylguanosine-3'-phosphate
  modified_base 7: mod_base = OTHER; note = 2'-deoxy-2'-fluoroadenosine-3'-phosphate
  modified_base 8: mod_base = OTHER; note = 2'-O-methyladenosine-3'-phosphate
  modified_base 9: mod_base = OTHER; note = 2'-deoxy-2'-fluorocytidine-3'-phosphate
  modified_base 10: mod_base = OTHER; note = 2'-deoxy-2'-fluoroadenosine-3'-phosphate
  modified_base 11: mod_base = OTHER; note = 2'-deoxy-2'-fluoroadenosine-3'-phosphate
  modified_base 12: mod_base = OTHER; note = 2'-O-methyluridine-3'-phosphate
  modified_base 13: mod_base = OTHER; note = 2'-O-methyladenosine-3'-phosphate
  modified_base 14: mod_base = OTHER; note = 2'-O-methyluridine-3'-phosphate
  modified_base 15: mod_base = OTHER; note = 2'-O-methyladenosine-3'-phosphate
  modified_base 16: mod_base = OTHER; note = 2'-O-methylguanosine-3'-phosphate
  modified_base 17: mod_base = OTHER; note = 2'-O-methyluridine-3'-phosphate
  modified_base 18: mod_base = OTHER; note = 2'-O-methyluridine-3'-phosphate
  modified_base 19: mod_base = OTHER; note = 2'-O-methyladenosine-3'-phosphate
  modified_base 20: mod_base = OTHER; note = 2'-O-methyladenosine-3'-phosphate
  modified_base 21: mod_base = OTHER; note = 2'-O-methyluridine-3'-phosphate ((2S,4R)-1-[29-[[2-(acetylamino)-2-deoxy-beta-D-galactopyra nosyl]oxy]-14,14-bis[[3-[[3-[[5-[[2-(acetylamino)-2-deoxy-b eta-D-galactopyranosyl]oxy]-1-oxopentyl]amino]propyl]amino] -3-oxopropoxy]methyl]-1,12,19,25-tetraoxo-16-oxa-13,20,24-t riazanonacos-1-yl]-4-hydroxy-2-pyrrolidinyl)methyl ester
gctgagaacaatatagttaat

SEQ ID NO: 5863 - RNA, 21 nt, synthetic construct
  source 1..21: mol_type = other RNA
  modified_base 1: mod_base = OTHER; note = 2'-O-methylcytidine-3'-phosphorothioate
  modified_base 2: mod_base = OTHER; note = 2'-O-methyluridine-3'-phosphorothioate
  modified_base 3: mod_base = OTHER; note = 2'-O-methylcytidine-3'-phosphate
  modified_base 4: mod_base = OTHER; note = 2'-O-methylcytidine-3'-phosphate
  modified_base 5: mod_base = OTHER; note = 2'-O-methyluridine-3'-phosphate
  modified_base 6: mod_base = OTHER; note = 2'-O-methyladenosine-3'-phosphate
  modified_base 7: mod_base = OTHER; note = 2'-deoxy-2'-fluoroadenosine-3'-phosphate
  modified_base 8: mod_base = OTHER; note = 2'-O-methyladenosine-3'-phosphate
  modified_base 9: mod_base = OTHER; note = 2'-deoxy-2'-fluoroadenosine-3'-phosphate
  modified_base 10: mod_base = OTHER; note = 2'-deoxy-2'-fluoroguanosine-3'-phosphate
  modified_base 11: mod_base = OTHER; note = 2'-deoxy-2'-fluorocytidine-3'-phosphate
  modified_base 12: mod_base = OTHER; note = 2'-O-methyluridine-3'-phosphate
  modified_base 13: mod_base = OTHER; note = 2'-O-methyluridine-3'-phosphate
  modified_base 14: mod_base = OTHER; note = 2'-O-methylcytidine-3'-phosphate
  modified_base 15: mod_base = OTHER; note = 2'-O-methyluridine-3'-phosphate
  modified_base 16: mod_base = OTHER; note = 2'-O-methylcytidine-3'-phosphate
  modified_base 17: mod_base = OTHER; note = 2'-O-methyluridine-3'-phosphate
  modified_base 18: mod_base = OTHER; note = 2'-O-methyladenosine-3'-phosphate
  modified_base 19: mod_base = OTHER; note = 2'-O-methyladenosine-3'-phosphate
  modified_base 20: mod_base = OTHER; note = 2'-O-methyladenosine-3'-phosphate
  modified_base 21: mod_base = OTHER; note = 2'-O-methyluridine-3'-phosphate ((2S,4R)-1-[29-[[2-(acetylamino)-2-deoxy-beta-D-galactopyra nosyl]oxy]-14,14-bis[[3-[[3-[[5-[[2-(acetylamino)-2-deoxy-b eta-D-galactopyranosyl]oxy]-1-oxopentyl]amino]propyl]amino] -3-oxopropoxy]methyl]-1,12,19,25-tetraoxo-16-oxa-13,20,24-t riazanonacos-1-yl]-4-hydroxy-2-pyrrolidinyl)methyl ester
ctcctaaaagcttctctaaat

SEQ ID NO: 5864 - RNA, 21 nt, synthetic construct
  source 1..21: mol_type = other RNA
  modified_base 1: mod_base = OTHER; note = 2'-O-methyluridine-3'-phosphorothioate
  modified_base 2: mod_base = OTHER; note = 2'-O-methylcytidine-3'-phosphorothioate
  modified_base 3: mod_base = OTHER; note = 2'-O-methylcytidine-3'-phosphate
  modified_base 4: mod_base = OTHER; note = 2'-O-methyladenosine-3'-phosphate
  modified_base 5: mod_base = OTHER; note = 2'-O-methyladenosine-3'-phosphate
  modified_base 6: mod_base = OTHER; note = 2'-O-methyluridine-3'-phosphate
  modified_base 7: mod_base = OTHER; note = 2'-deoxy-2'-fluorocytidine-3'-phosphate
  modified_base 8: mod_base = OTHER; note = 2'-O-methylcytidine-3'-phosphate
  modified_base 9: mod_base = OTHER; note = 2'-deoxy-2'-fluoroadenosine-3'-phosphate
  modified_base 10: mod_base = OTHER; note = 2'-deoxy-2'-fluoroguanosine-3'-phosphate
  modified_base 11: mod_base = OTHER; note = 2'-deoxy-2'-fluorocytidine-3'-phosphate
  modified_base 12: mod_base = OTHER; note = 2'-O-methylcytidine-3'-phosphate
  modified_base 13: mod_base = OTHER; note = 2'-O-methyluridine-3'-phosphate
  modified_base 14: mod_base = OTHER; note = 2'-O-methyluridine-3'-phosphate
  modified_base 15: mod_base = OTHER; note = 2'-O-methylcytidine-3'-phosphate
  modified_base 16: mod_base = OTHER; note = 2'-O-methyladenosine-3'-phosphate
  modified_base 17: mod_base = OTHER; note = 2'-O-methylcytidine-3'-phosphate
  modified_base 18: mod_base = OTHER; note = 2'-O-methyladenosine-3'-phosphate
  modified_base 19: mod_base = OTHER; note = 2'-O-methyluridine-3'-phosphate
  modified_base 20: mod_base = OTHER; note = 2'-O-methylguanosine-3'-phosphate
  modified_base 21: mod_base = OTHER; note = 2'-O-methyluridine-3'-phosphate ((2S,4R)-1-[29-[[2-(acetylamino)-2-deoxy-beta-D-galactopyra nosyl]oxy]-14,14-bis[[3-[[3-[[5-[[2-(acetylamino)-2-deoxy-b eta-D-galactopyranosyl]oxy]-1-oxopentyl]amino]propyl]amino] -3-oxopropoxy]methyl]-1,12,19,25-tetraoxo-16-oxa-13,20,24-t riazanonacos-1-yl]-4-hydroxy-2-pyrrolidinyl)methyl ester
tccaatccagccttcacatgt

SEQ ID NO: 5865 - RNA, 21 nt, synthetic construct
  source 1..21: mol_type = other RNA
  modified_base 1: mod_base = OTHER; note = 2'-O-methyluridine-3'-phosphorothioate
  modified_base 2: mod_base = OTHER; note = 2'-O-methyluridine-3'-phosphorothioate
  modified_base 3: mod_base = OTHER; note = 2'-O-methyluridine-3'-phosphate
  modified_base 4: mod_base = OTHER; note = 2'-O-methyluridine-3'-phosphate
  modified_base 5: mod_base = OTHER; note = 2'-O-methyluridine-3'-phosphate
  modified_base 6: mod_base = OTHER; note = 2'-O-methyluridine-3'-phosphate
  modified_base 7: mod_base = OTHER; note = 2'-deoxy-2'-fluoroadenosine-3'-phosphate
  modified_base 8: mod_base = OTHER; note = 2'-O-methyladenosine-3'-phosphate
  modified_base 9: mod_base = OTHER; note = 2'-deoxy-2'-fluorouridine-3'-phosphate
  modified_base 10: mod_base = OTHER; note = 2'-deoxy-2'-fluoroadenosine-3'-phosphate
  modified_base 11: mod_base = OTHER; note = 2'-deoxy-2'-fluorocytidine-3'-phosphate
  modified_base 12: mod_base = OTHER; note = 2'-O-methylguanosine-3'-phosphate
  modified_base 13: mod_base = OTHER; note = 2'-O-methyladenosine-3'-phosphate
  modified_base 14: mod_base = OTHER; note = 2'-O-methyladenosine-3'-phosphate
  modified_base 15: mod_base = OTHER; note = 2'-O-methylcytidine-3'-phosphate
  modified_base 16: mod_base = OTHER; note = 2'-O-methylcytidine-3'-phosphate
  modified_base 17: mod_base = OTHER; note = 2'-O-methyluridine-3'-phosphate
  modified_base 18: mod_base = OTHER; note = 2'-O-methylguanosine-3'-phosphate
  modified_base 19: mod_base = OTHER; note = 2'-O-methyluridine-3'-phosphate
  modified_base 20: mod_base = OTHER; note = 2'-O-methylcytidine-3'-phosphate
  modified_base 21: mod_base = OTHER; note = 2'-O-methyluridine-3'-phosphate ((2S,4R)-1-[29-[[2-(acetylamino)-2-deoxy-beta-D-galactopyra nosyl]oxy]-14,14-bis[[3-[[3-[[5-[[2-(acetylamino)-2-deoxy-b eta-D-galactopyranosyl]oxy]-1-oxopentyl]amino]propyl]amino] -3-oxopropoxy]methyl]-1,12,19,25-tetraoxo-16-oxa-13,20,24-t riazanonacos-1-yl]-4-hydroxy-2-pyrrolidinyl)methyl ester
ttttttaatacgaacctgtct

SEQ ID NO: 5866 - RNA, 21 nt, synthetic construct
  source 1..21: mol_type = other RNA
  modified_base 1: mod_base = OTHER; note = 2'-O-methyladenosine-3'-phosphorothioate
  modified_base 2: mod_base = OTHER; note = 2'-O-methyladenosine-3'-phosphorothioate
  modified_base 3: mod_base = OTHER; note = 2'-O-methylcytidine-3'-phosphate
  modified_base 4: mod_base = OTHER; note = 2'-O-methyladenosine-3'-phosphate
  modified_base 5: mod_base = OTHER; note = 2'-O-methylcytidine-3'-phosphate
  modified_base 6: mod_base = OTHER; note = 2'-O-methyluridine-3'-phosphate
  modified_base 7: mod_base = OTHER; note = 2'-deoxy-2'-fluorouridine-3'-phosphate
  modified_base 8: mod_base = OTHER; note = 2'-O-methyluridine-3'-phosphate
  modified_base 9: mod_base = OTHER; note = 2'-deoxy-2'-fluoroguanosine-3'-phosphate
  modified_base 10: mod_base = OTHER; note = 2'-deoxy-2'-fluoroadenosine-3'-phosphate
  modified_base 11: mod_base = OTHER; note = 2'-deoxy-2'-fluorouridine-3'-phosphate
  modified_base 12: mod_base = OTHER; note = 2'-O-methylguanosine-3'-phosphate
  modified_base 13: mod_base = OTHER; note = 2'-O-methyluridine-3'-phosphate
  modified_base 14: mod_base = OTHER; note = 2'-O-methyluridine-3'-phosphate
  modified_base 15: mod_base = OTHER; note = 2'-O-methyladenosine-3'-phosphate
  modified_base 16: mod_base = OTHER; note = 2'-O-methyluridine-3'-phosphate
  modified_base 17: mod_base = OTHER; note = 2'-O-methylcytidine-3'-phosphate
  modified_base 18: mod_base = OTHER; note = 2'-O-methyladenosine-3'-phosphate
  modified_base 19: mod_base = OTHER; note = 2'-O-methyluridine-3'-phosphate
  modified_base 20: mod_base = OTHER; note = 2'-O-methyluridine-3'-phosphate
  modified_base 21: mod_base = OTHER; note = 2'-O-methyluridine-3'-phosphate ((2S,4R)-1-[29-[[2-(acetylamino)-2-deoxy-beta-D-galactopyra nosyl]oxy]-14,14-bis[[3-[[3-[[5-[[2-(acetylamino)-2-deoxy-b eta-D-galactopyranosyl]oxy]-1-oxopentyl]amino]propyl]amino] -3-oxopropoxy]methyl]-1,12,19,25-tetraoxo-16-oxa-13,20,24-t riazanonacos-1-yl]-4-hydroxy-2-pyrrolidinyl)methyl ester
aacactttgatgttatcattt

SEQ ID NO: 5867 - RNA, 21 nt, synthetic construct
  source 1..21: mol_type = other RNA
  modified_base 1: mod_base = OTHER; note = 2'-O-methylcytidine-3'-phosphorothioate
  modified_base 2: mod_base = OTHER; note = 2'-O-methyladenosine-3'-phosphorothioate
  modified_base 3: mod_base = OTHER; note = 2'-O-methylguanosine-3'-phosphate
  modified_base 4: mod_base = OTHER; note = 2'-O-methylcytidine-3'-phosphate
  modified_base 5: mod_base = OTHER; note = 2'-O-methyluridine-3'-phosphate
  modified_base 6: mod_base = OTHER; note = 2'-O-methyluridine-3'-phosphate
  modified_base 7: mod_base = OTHER; note = 2'-deoxy-2'-fluoroguanosine-3'-phosphate
  modified_base 8: mod_base = OTHER; note = 2'-O-methyladenosine-3'-phosphate
  modified_base 9: mod_base = OTHER; note = 2'-deoxy-2'-fluoroadenosine-3'-phosphate
  modified_base 10: mod_base = OTHER; note = 2'-deoxy-2'-fluorocytidine-3'-phosphate
  modified_base 11: mod_base = OTHER; note = 2'-deoxy-2'-fluorouridine-3'-phosphate
  modified_base 12: mod_base = OTHER; note = 2'-O-methyluridine-3'-phosphate
  modified_base 13: mod_base = OTHER; note = 2'-O-methylguanosine-3'-phosphate
  modified_base 14: mod_base = OTHER; note = 2'-O-methyladenosine-3'-phosphate
  modified_base 15: mod_base = OTHER; note = 2'-O-methylguanosine-3'-phosphate
  modified_base 16: mod_base = OTHER; note = 2'-O-methylcytidine-3'-phosphate
  modified_base 17: mod_base = OTHER; note = 2'-O-methyladenosine-3'-phosphate
  modified_base 18: mod_base = OTHER; note = 2'-O-methyluridine-3'-phosphate
  modified_base 19: mod_base = OTHER; note = 2'-O-methyladenosine-3'-phosphate
  modified_base 20: mod_base = OTHER; note = 2'-O-methylcytidine-3'-phosphate
  modified_base 21: mod_base = OTHER; note = 2'-O-methyluridine-3'-phosphate ((2S,4R)-1-[29-[[2-(acetylamino)-2-deoxy-beta-D-galactopyra nosyl]oxy]-14,14-bis[[3-[[3-[[5-[[2-(acetylamino)-2-deoxy-b eta-D-galactopyranosyl]oxy]-1-oxopentyl]amino]propyl]amino] -3-oxopropoxy]methyl]-1,12,19,25-tetraoxo-16-oxa-13,20,24-t riazanonacos-1-yl]-4-hydroxy-2-pyrrolidinyl)methyl ester
cagcttgaacttgagcatact

SEQ ID NO: 5868 - RNA, 21 nt, synthetic construct
  source 1..21: mol_type = other RNA
  modified_base 1: mod_base = OTHER; note = 2'-O-methyladenosine-3'-phosphorothioate
  modified_base 2: mod_base = OTHER; note = 2'-O-methylguanosine-3'-phosphorothioate
  modified_base 3: mod_base = OTHER; note = 2'-O-methylcytidine-3'-phosphate
  modified_base 4: mod_base = OTHER; note = 2'-O-methyluridine-3'-phosphate
  modified_base 5: mod_base = OTHER; note = 2'-O-methyluridine-3'-phosphate
  modified_base 6: mod_base = OTHER; note = 2'-O-methylcytidine-3'-phosphate
  modified_base 7: mod_base = OTHER; note = 2'-deoxy-2'-fluorouridine-3'-phosphate
  modified_base 8: mod_base = OTHER; note = 2'-O-methyluridine-3'-phosphate
  modified_base 9: mod_base = OTHER; note = 2'-deoxy-2'-fluorouridine-3'-phosphate
  modified_base 10: mod_base = OTHER; note = 2'-deoxy-2'-fluorouridine-3'-phosphate
  modified_base 11: mod_base = OTHER; note = 2'-deoxy-2'-fluoroguanosine-3'-phosphate
  modified_base 12: mod_base = OTHER; note = 2'-O-methyladenosine-3'-phosphate
  modified_base 13: mod_base = OTHER; note = 2'-O-methyluridine-3'-phosphate
  modified_base 14: mod_base = OTHER; note = 2'-O-methyluridine-3'-phosphate
  modified_base 15: mod_base = OTHER; note = 2'-O-methyluridine-3'-phosphate
  modified_base 16: mod_base = OTHER; note = 2'-O-methylguanosine-3'-phosphate
  modified_base 17: mod_base = OTHER; note = 2'-O-methylcytidine-3'-phosphate
  modified_base 18: mod_base = OTHER; note = 2'-O-methyluridine-3'-phosphate
  modified_base 19: mod_base = OTHER; note = 2'-O-methyladenosine-3'-phosphate
  modified_base 20: mod_base = OTHER; note = 2'-O-methyladenosine-3'-phosphate
  modified_base 21: mod_base = OTHER; note = 2'-O-methyluridine-3'-phosphate ((2S,4R)-1-[29-[[2-(acetylamino)-2-deoxy-beta-D-galactopyra nosyl]oxy]-14,14-bis[[3-[[3-[[5-[[2-(acetylamino)-2-deoxy-b eta-D-galactopyranosyl]oxy]-1-oxopentyl]amino]propyl]amino] -3-oxopropoxy]methyl]-1,12,19,25-tetraoxo-16-oxa-13,20,24-t riazanonacos-1-yl]-4-hydroxy-2-pyrrolidinyl)methyl ester
agcttcttttgatttgctaat

SEQ ID NO: 5869 - RNA, 21 nt, synthetic construct
  source 1..21: mol_type = other RNA
  modified_base 1: mod_base = OTHER; note = 2'-O-methyladenosine-3'-phosphorothioate
  modified_base 2: mod_base = OTHER; note = 2'-O-methylcytidine-3'-phosphorothioate
  modified_base 3: mod_base = OTHER; note = 2'-O-methyladenosine-3'-phosphate
  modified_base 4: mod_base = OTHER; note = 2'-O-methyluridine-3'-phosphate
  modified_base 5: mod_base = OTHER; note = 2'-O-methylcytidine-3'-phosphate
  modified_base 6: mod_base = OTHER; note = 2'-O-methyladenosine-3'-phosphate
  modified_base 7: mod_base = OTHER; note = 2'-deoxy-2'-fluorocytidine-3'-phosphate
  modified_base 8: mod_base = OTHER; note = 2'-O-methyladenosine-3'-phosphate
  modified_base 9: mod_base = OTHER; note = 2'-deoxy-2'-fluorocytidine-3'-phosphate
  modified_base 10: mod_base = OTHER; note = 2'-deoxy-2'-fluorouridine-3'-phosphate
  modified_base 11: mod_base = OTHER; note = 2'-deoxy-2'-fluorouridine-3'-phosphate
  modified_base 12: mod_base = OTHER; note = 2'-O-methylguanosine-3'-phosphate
  modified_base 13: mod_base = OTHER; note = 2'-O-methylcytidine-3'-phosphate
  modified_base 14: mod_base = OTHER; note = 2'-O-methyluridine-3'-phosphate
  modified_base 15: mod_base = OTHER; note = 2'-O-methylcytidine-3'-phosphate
  modified_base 16: mod_base = OTHER; note = 2'-O-methyladenosine-3'-phosphate
  modified_base 17: mod_base = OTHER; note = 2'-O-methylcytidine-3'-phosphate
  modified_base 18: mod_base = OTHER; note = 2'-O-methyladenosine-3'-phosphate
  modified_base 19: mod_base = OTHER; note = 2'-O-methyluridine-3'-phosphate
  modified_base 20: mod_base = OTHER; note = 2'-O-methylguanosine-3'-phosphate
  modified_base 21: mod_base = OTHER; note = 2'-O-methyluridine-3'-phosphate ((2S,4R)-1-[29-[[2-(acetylamino)-2-deoxy-beta-D-galactopyra nosyl]oxy]-14,14-bis[[3-[[3-[[5-[[2-(acetylamino)-2-deoxy-b eta-D-galactopyranosyl]oxy]-1-oxopentyl]amino]propyl]amino] -3-oxopropoxy]methyl]-1,12,19,25-tetraoxo-16-oxa-13,20,24-t riazanonacos-1-yl]-4-hydroxy-2-pyrrolidinyl)methyl ester
acatcacacttgctcacatgt

SEQ ID NO: 5870 - RNA, 21 nt, synthetic construct
  source 1..21: mol_type = other RNA
  modified_base 1: mod_base = OTHER; note = 2'-O-methyladenosine-3'-phosphorothioate
  modified_base 2: mod_base = OTHER; note = 2'-O-methyluridine-3'-phosphorothioate
  modified_base 3: mod_base = OTHER; note = 2'-O-methylguanosine-3'-phosphate
  modified_base 4: mod_base = OTHER; note = 2'-O-methylcytidine-3'-phosphate
  modified_base 5: mod_base = OTHER; note = 2'-O-methylcytidine-3'-phosphate
  modified_base 6: mod_base = OTHER; note = 2'-O-methyluridine-3'-phosphate
  modified_base 7: mod_base = OTHER; note = 2'-deoxy-2'-fluoroguanosine-3'-phosphate
  modified_base 8: mod_base = OTHER; note = 2'-O-methyluridine-3'-phosphate
  modified_base 9: mod_base = OTHER; note = 2'-deoxy-2'-fluorouridine-3'-phosphate
  modified_base 10: mod_base = OTHER; note = 2'-deoxy-2'-fluorouridine-3'-phosphate
  modified_base 11: mod_base = OTHER; note = 2'-deoxy-2'-fluoroadenosine-3'-phosphate
  modified_base 12: mod_base = OTHER; note = 2'-O-methyluridine-3'-phosphate
  modified_base 13: mod_base = OTHER; note = 2'-O-methylguanosine-3'-phosphate
  modified_base 14: mod_base = OTHER; note = 2'-O-methylcytidine-3'-phosphate
  modified_base 15: mod_base = OTHER; note = 2'-O-methyluridine-3'-phosphate
  modified_base 16: mod_base = OTHER; note = 2'-O-methylguanosine-3'-phosphate
  modified_base 17: mod_base = OTHER; note = 2'-O-methyluridine-3'-phosphate
  modified_base 18: mod_base = OTHER; note = 2'-O-methyluridine-3'-phosphate
  modified_base 19: mod_base = OTHER; note = 2'-O-methylcytidine-3'-phosphate
  modified_base 20: mod_base = OTHER; note = 2'-O-methyladenosine-3'-phosphate
  modified_base 21: mod_base = OTHER; note = 2'-O-methyluridine-3'-phosphate ((2S,4R)-1-[29-[[2-(acetylamino)-2-deoxy-beta-D-galactopyra nosyl]oxy]-14,14-bis[[3-[[3-[[5-[[2-(acetylamino)-2-deoxy-b eta-D-galactopyranosyl]oxy]-1-oxopentyl]amino]propyl]amino] -3-oxopropoxy]methyl]-1,12,19,25-tetraoxo-16-oxa-13,20,24-t riazanonacos-1-yl]-4-hydroxy-2-pyrrolidinyl)methyl ester
atgcctgtttatgctgttcat

SEQ ID NO: 5871 - RNA, 21 nt, synthetic construct
  source 1..21: mol_type = other RNA
  modified_base 1: mod_base = OTHER; note = 2'-O-methyladenosine-3'-phosphorothioate
  modified_base 2: mod_base = OTHER; note = 2'-O-methyluridine-3'-phosphorothioate
  modified_base 3: mod_base = OTHER; note = 2'-O-methylguanosine-3'-phosphate
  modified_base 4: mod_base = OTHER; note = 2'-O-methyluridine-3'-phosphate
  modified_base 5: mod_base = OTHER; note = 2'-O-methyluridine-3'-phosphate
  modified_base 6: mod_base = OTHER; note = 2'-O-methylguanosine-3'-phosphate
  modified_base 7: mod_base = OTHER; note = 2'-deoxy-2'-fluorouridine-3'-phosphate
  modified_base 8: mod_base = OTHER; note = 2'-O-methyluridine-3'-phosphate
  modified_base 9: mod_base = OTHER; note = 2'-deoxy-2'-fluorouridine-3'-phosphate
  modified_base 10: mod_base = OTHER; note = 2'-deoxy-2'-fluoroadenosine-3'-phosphate
  modified_base 11: mod_base = OTHER; note = 2'-deoxy-2'-fluorouridine-3'-phosphate
  modified_base 12: mod_base = OTHER; note = 2'-O-methylguanosine-3'-phosphate
  modified_base 13: mod_base = OTHER; note = 2'-O-methyluridine-3'-phosphate
  modified_base 14: mod_base = OTHER; note = 2'-O-methyluridine-3'-phosphate
  modified_base 15: mod_base = OTHER; note = 2'-O-methyluridine-3'-phosphate
  modified_base 16: mod_base = OTHER; note = 2'-O-methylcytidine-3'-phosphate
  modified_base 17: mod_base = OTHER; note = 2'-O-methyluridine-3'-phosphate
  modified_base 18: mod_base = OTHER; note = 2'-O-methyluridine-3'-phosphate
  modified_base 19: mod_base = OTHER; note = 2'-O-methyladenosine-3'-phosphate
  modified_base 20: mod_base = OTHER; note = 2'-O-methylcytidine-3'-phosphate
  modified_base 21: mod_base = OTHER; note = 2'-O-methyluridine-3'-phosphate ((2S,4R)-1-[29-[[2-(acetylamino)-2-deoxy-beta-D-galactopyra nosyl]oxy]-14,14-bis[[3-[[3-[[5-[[2-(acetylamino)-2-deoxy-b eta-D-galactopyranosyl]oxy]-1-oxopentyl]amino]propyl]amino] -3-oxopropoxy]methyl]-1,12,19,25-tetraoxo-16-oxa-13,20,24-t riazanonacos-1-yl]-4-hydroxy-2-pyrrolidinyl)methyl ester
atgttgtttatgtttcttact

SEQ ID NO: 5872 - RNA, 21 nt, synthetic construct
  source 1..21: mol_type = other RNA
  modified_base 1: mod_base = OTHER; note = 2'-O-methyluridine-3'-phosphorothioate
  modified_base 2: mod_base = OTHER; note = 2'-O-methyluridine-3'-phosphorothioate
  modified_base 3: mod_base = OTHER; note = 2'-O-methyladenosine-3'-phosphate
  modified_base 4: mod_base = OTHER; note = 2'-O-methylcytidine-3'-phosphate
  modified_base 5: mod_base = OTHER; note = 2'-O-methylcytidine-3'-phosphate
  modified_base 6: mod_base = OTHER; note = 2'-O-methyluridine-3'-phosphate
  modified_base 7: mod_base = OTHER; note = 2'-deoxy-2'-fluoroadenosine-3'-phosphate
  modified_base 8: mod_base = OTHER; note = 2'-O-methylguanosine-3'-phosphate
  modified_base 9: mod_base = OTHER; note = 2'-deoxy-2'-fluoroadenosine-3'-phosphate
  modified_base 10: mod_base = OTHER; note = 2'-deoxy-2'-fluoroadenosine-3'-phosphate
  modified_base 11: mod_base = OTHER; note = 2'-deoxy-2'-fluorouridine-3'-phosphate
  modified_base 12: mod_base = OTHER; note = 2'-O-methyladenosine-3'-phosphate
  modified_base 13: mod_base = OTHER; note = 2'-O-methyladenosine-3'-phosphate
  modified_base 14: mod_base = OTHER; note = 2'-O-methyladenosine-3'-phosphate
  modified_base 15: mod_base = OTHER; note = 2'-O-methyluridine-3'-phosphate
  modified_base 16: mod_base = OTHER; note = 2'-O-methyladenosine-3'-phosphate
  modified_base 17: mod_base = OTHER; note = 2'-O-methylguanosine-3'-phosphate
  modified_base 18: mod_base = OTHER; note = 2'-O-methyluridine-3'-phosphate
  modified_base 19: mod_base = OTHER; note = 2'-O-methylcytidine-3'-phosphate
  modified_base 20: mod_base = OTHER; note = 2'-O-methyluridine-3'-phosphate
  modified_base 21: mod_base = OTHER; note = 2'-O-methyluridine-3'-phosphate ((2S,4R)-1-[29-[[2-(acetylamino)-2-deoxy-beta-D-galactopyra nosyl]oxy]-14,14-bis[[3-[[3-[[5-[[2-(acetylamino)-2-deoxy-b eta-D-galactopyranosyl]oxy]-1-oxopentyl]amino]propyl]amino] -3-oxopropoxy]methyl]-1,12,19,25-tetraoxo-16-oxa-13,20,24-t riazanonacos-1-yl]-4-hydroxy-2-pyrrolidinyl)methyl ester
ttacctagaataaatagtctt

SEQ ID NO: 5873 - RNA, 21 nt, synthetic construct
  source 1..21: mol_type = other RNA
  modified_base 1: mod_base = OTHER; note = 2'-O-methyluridine-3'-phosphorothioate
  modified_base 2: mod_base = OTHER; note = 2'-O-methyladenosine-3'-phosphorothioate
  modified_base 3: mod_base = OTHER; note = 2'-O-methylcytidine-3'-phosphate
  modified_base 4: mod_base = OTHER; note = 2'-O-methyluridine-3'-phosphate
  modified_base 5: mod_base = OTHER; note = 2'-O-methyluridine-3'-phosphate
  modified_base 6: mod_base = OTHER; note = 2'-O-methylcytidine-3'-phosphate
  modified_base 7: mod_base = OTHER; note = 2'-deoxy-2'-fluorouridine-3'-phosphate
  modified_base 8: mod_base = OTHER; note = 2'-O-methyluridine-3'-phosphate
  modified_base 9: mod_base = OTHER; note = 2'-deoxy-2'-fluorouridine-3'-phosphate
  modified_base 10: mod_base = OTHER; note = 2'-deoxy-2'-fluorouridine-3'-phosphate
  modified_base 11: mod_base = OTHER; note = 2'-deoxy-2'-fluorocytidine-3'-phosphate
  modified_base 12: mod_base = OTHER; note = 2'-O-methylcytidine-3'-phosphate
  modified_base 13: mod_base = OTHER; note = 2'-O-methylcytidine-3'-phosphate
  modified_base 14: mod_base = OTHER; note = 2'-O-methylguanosine-3'-phosphate
  modified_base 15: mod_base = OTHER; note = 2'-O-methyladenosine-3'-phosphate
  modified_base 16: mod_base = OTHER; note = 2'-O-methylcytidine-3'-phosphate
  modified_base 17: mod_base = OTHER; note = 2'-O-methyluridine-3'-phosphate
  modified_base 18: mod_base = OTHER; note = 2'-O-methyluridine-3'-phosphate
  modified_base 19: mod_base = OTHER; note = 2'-O-methylcytidine-3'-phosphate
  modified_base 20: mod_base = OTHER; note = 2'-O-methyluridine-3'-phosphate
  modified_base 21: mod_base = OTHER; note = 2'-O-methyluridine-3'-phosphate ((2S,4R)-1-[29-[[2-(acetylamino)-2-deoxy-beta-D-galactopyra nosyl]oxy]-14,14-bis[[3-[[3-[[5-[[2-(acetylamino)-2-deoxy-b eta-D-galactopyranosyl]oxy]-1-oxopentyl]amino]propyl]amino] -3-oxopropoxy]methyl]-1,12,19,25-tetraoxo-16-oxa-13,20,24-t riazanonacos-1-yl]-4-hydroxy-2-pyrrolidinyl)methyl ester
tacttcttttcccgacttctt

SEQ ID NO: 5874 - RNA, 21 nt, synthetic construct
  source 1..21: mol_type = other RNA
  modified_base 1: mod_base = OTHER; note = 2'-O-methyluridine-3'-phosphorothioate
  modified_base 2: mod_base = OTHER; note = 2'-O-methyluridine-3'-phosphorothioate
  modified_base 3: mod_base = OTHER; note = 2'-O-methyladenosine-3'-phosphate
  modified_base 4: mod_base = OTHER; note = 2'-O-methylcytidine-3'-phosphate
  modified_base 5: mod_base = OTHER; note = 2'-O-methyluridine-3'-phosphate
  modified_base 6: mod_base = OTHER; note = 2'-O-methyluridine-3'-phosphate
  modified_base 7: mod_base = OTHER; note = 2'-deoxy-2'-fluorouridine-3'-phosphate
  modified_base 8: mod_base = OTHER; note = 2'-O-methyluridine-3'-phosphate
  modified_base 9: mod_base = OTHER; note = 2'-deoxy-2'-fluorouridine-3'-phosphate
  modified_base 10: mod_base = OTHER; note = 2'-deoxy-2'-fluorocytidine-3'-phosphate
  modified_base 11: mod_base = OTHER; note = 2'-deoxy-2'-fluorocytidine-3'-phosphate
  modified_base 12: mod_base = OTHER; note = 2'-O-methyluridine-3'-phosphate
  modified_base 13: mod_base = OTHER; note = 2'-O-methyladenosine-3'-phosphate
  modified_base 14: mod_base = OTHER; note = 2'-O-methyladenosine-3'-phosphate
  modified_base 15: mod_base = OTHER; note = 2'-O-methylguanosine-3'-phosphate
  modified_base 16: mod_base = OTHER; note = 2'-O-methyladenosine-3'-phosphate
  modified_base 17: mod_base = OTHER; note = 2'-O-methyluridine-3'-phosphate
  modified_base 18: mod_base = OTHER; note = 2'-O-methyluridine-3'-phosphate
  modified_base 19: mod_base = OTHER; note = 2'-O-methylcytidine-3'-phosphate
  modified_base 20: mod_base = OTHER; note = 2'-O-methyladenosine-3'-phosphate
  modified_base 21: mod_base = OTHER; note = 2'-O-methyluridine-3'-phosphate ((2S,4R)-1-[29-[[2-(acetylamino)-2-deoxy-beta-D-galactopyra nosyl]oxy]-14,14-bis[[3-[[3-[[5-[[2-(acetylamino)-2-deoxy-b eta-D-galactopyranosyl]oxy]-1-oxopentyl]amino]propyl]amino] -3-oxopropoxy]methyl]-1,12,19,25-tetraoxo-16-oxa-13,20,24-t riazanonacos-1-yl]-4-hydroxy-2-pyrrolidinyl)methyl ester
ttactttttcctaagattcat

SEQ ID NO: 5875 - RNA, 21 nt, synthetic construct
  source 1..21: mol_type = other RNA
  modified_base 1: mod_base = OTHER; note = 2'-O-methyladenosine-3'-phosphorothioate
  modified_base 2: mod_base = OTHER; note = 2'-O-methylguanosine-3'-phosphorothioate
  modified_base 3: mod_base = OTHER; note = 2'-O-methyluridine-3'-phosphate
  modified_base 4: mod_base = OTHER; note = 2'-O-methylguanosine-3'-phosphate
  modified_base 5: mod_base = OTHER; note = 2'-O-methyluridine-3'-phosphate
  modified_base 6: mod_base = OTHER; note = 2'-O-methyladenosine-3'-phosphate
  modified_base 7: mod_base = OTHER; note = 2'-deoxy-2'-fluorocytidine-3'-phosphate
  modified_base 8: mod_base = OTHER; note = 2'-O-methyladenosine-3'-phosphate
  modified_base 9: mod_base = OTHER; note = 2'-deoxy-2'-fluoroguanosine-3'-phosphate
  modified_base 10: mod_base = OTHER; note = 2'-deoxy-2'-fluorocytidine-3'-phosphate
  modified_base 11: mod_base = OTHER; note = 2'-deoxy-2'-fluoroadenosine-3'-phosphate
  modified_base 12: mod_base = OTHER; note = 2'-O-methyluridine-3'-phosphate
  modified_base 13: mod_base = OTHER; note = 2'-O-methylcytidine-3'-phosphate
  modified_base 14: mod_base = OTHER; note = 2'-O-methyladenosine-3'-phosphate
  modified_base 15: mod_base = OTHER; note = 2'-O-methyluridine-3'-phosphate
  modified_base 16: mod_base = OTHER; note = 2'-O-methylguanosine-3'-phosphate
  modified_base 17: mod_base = OTHER; note = 2'-O-methylcytidine-3'-phosphate
  modified_base 18: mod_base = OTHER; note = 2'-O-methyluridine-3'-phosphate
  modified_base 19: mod_base = OTHER; note = 2'-O-methylcytidine-3'-phosphate
  modified_base 20: mod_base = OTHER; note = 2'-O-methylcytidine-3'-phosphate
  modified_base 21: mod_base = OTHER; note = 2'-O-methyluridine-3'-phosphate ((2S,4R)-1-[29-[[2-(acetylamino)-2-deoxy-beta-D-galactopyra nosyl]oxy]-14,14-bis[[3-[[3-[[5-[[2-(acetylamino)-2-deoxy-b eta-D-galactopyranosyl]oxy]-1-oxopentyl]amino]propyl]amino] -3-oxopropoxy]methyl]-1,12,19,25-tetraoxo-16-oxa-13,20,24-t riazanonacos-1-yl]-4-hydroxy-2-pyrrolidinyl)methyl ester
agtgtacagcatcatgctcct

SEQ ID NO: 5876 - RNA, 21 nt, synthetic construct
  source 1..21: mol_type = other RNA
  modified_base 1: mod_base = OTHER; note = 2'-O-methylguanosine-3'-phosphorothioate
  modified_base 2: mod_base = OTHER; note = 2'-O-methylcytidine-3'-phosphorothioate
  modified_base 3: mod_base = OTHER; note = 2'-O-methyluridine-3'-phosphate
  modified_base 4: mod_base = OTHER; note = 2'-O-methylcytidine-3'-phosphate
  modified_base 5: mod_base = OTHER; note = 2'-O-methylcytidine-3'-phosphate
  modified_base 6: mod_base = OTHER; note = 2'-O-methyladenosine-3'-phosphate
  modified_base 7: mod_base = OTHER; note = 2'-deoxy-2'-fluorocytidine-3'-phosphate
  modified_base 8: mod_base = OTHER; note = 2'-O-methyladenosine-3'-phosphate
  modified_base 9: mod_base = OTHER; note = 2'-deoxy-2'-fluoroguanosine-3'-phosphate
  modified_base 10: mod_base = OTHER; note = 2'-deoxy-2'-fluorocytidine-3'-phosphate
  modified_base 11: mod_base = OTHER; note = 2'-deoxy-2'-fluoroadenosine-3'-phosphate
  modified_base 12: mod_base = OTHER; note = 2'-O-methyladenosine-3'-phosphate
  modified_base 13: mod_base = OTHER; note = 2'-O-methyladenosine-3'-phosphate
  modified_base 14: mod_base = OTHER; note = 2'-O-methylcytidine-3'-phosphate
  modified_base 15: mod_base = OTHER; note = 2'-O-methylcytidine-3'-phosphate
  modified_base 16: mod_base = OTHER; note = 2'-O-methyluridine-3'-phosphate
  modified_base 17: mod_base = OTHER; note = 2'-O-methyluridine-3'-phosphate
  modified_base 18: mod_base = OTHER; note = 2'-O-methylcytidine-3'-phosphate
  modified_base 19: mod_base = OTHER; note = 2'-O-methylcytidine-3'-phosphate
  modified_base 20: mod_base = OTHER; note = 2'-O-methyluridine-3'-phosphate
  modified_base 21: mod_base = OTHER; note = 2'-O-methyluridine-3'-phosphate ((2S,4R)-1-[29-[[2-(acetylamino)-2-deoxy-beta-D-galactopyra nosyl]oxy]-14,14-bis[[3-[[3-[[5-[[2-(acetylamino)-2-deoxy-b eta-D-galactopyranosyl]oxy]-1-oxopentyl]amino]propyl]amino] -3-oxopropoxy]methyl]-1,12,19,25-tetraoxo-16-oxa-13,20,24-t riazanonacos-1-yl]-4-hydroxy-2-pyrrolidinyl)methyl ester
gctccacagcaaaccttcctt

SEQ ID NO: 5877 - RNA, 21 nt, synthetic construct
  source 1..21: mol_type = other RNA
  modified_base 1: mod_base = OTHER; note = 2'-O-methylcytidine-3'-phosphorothioate
  modified_base 2: mod_base = OTHER; note = 2'-O-methylcytidine-3'-phosphorothioate
  modified_base 3: mod_base = OTHER; note = 2'-O-methyluridine-3'-phosphate
  modified_base 4: mod_base = OTHER; note = 2'-O-methylcytidine-3'-phosphate
  modified_base 5: mod_base = OTHER; note = 2'-O-methyluridine-3'-phosphate
  modified_base 6: mod_base = OTHER; note = 2'-O-methylcytidine-3'-phosphate
  modified_base 7: mod_base = OTHER; note = 2'-deoxy-2'-fluoroadenosine-3'-phosphate
  modified_base 8: mod_base = OTHER; note = 2'-O-methyladenosine-3'-phosphate
  modified_base 9: mod_base = OTHER; note = 2'-deoxy-2'-fluoroadenosine-3'-phosphate
  modified_base 10: mod_base = OTHER; note = 2'-deoxy-2'-fluoroadenosine-3'-phosphate
  modified_base 11: mod_base = OTHER; note = 2'-deoxy-2'-fluorocytidine-3'-phosphate
  modified_base 12: mod_base = OTHER; note = 2'-O-methylcytidine-3'-phosphate
  modified_base 13: mod_base = OTHER; note = 2'-O-methyluridine-3'-phosphate
  modified_base 14: mod_base = OTHER; note = 2'-O-methyladenosine-3'-phosphate
  modified_base 15: mod_base = OTHER; note = 2'-O-methylcytidine-3'-phosphate
  modified_base 16: mod_base = OTHER; note = 2'-O-methyladenosine-3'-phosphate
  modified_base 17: mod_base = OTHER; note = 2'-O-methyluridine-3'-phosphate
  modified_base 18: mod_base = OTHER; note = 2'-O-methyladenosine-3'-phosphate
  modified_base 19: mod_base = OTHER; note = 2'-O-methyladenosine-3'-phosphate
  modified_base 20: mod_base = OTHER; note = 2'-O-methyluridine-3'-phosphate
  modified_base 21: mod_base = OTHER; note = 2'-O-methyluridine-3'-phosphate ((2S,4R)-1-[29-[[2-(acetylamino)-2-deoxy-beta-D-galactopyra nosyl]oxy]-14,14-bis[[3-[[3-[[5-[[2-(acetylamino)-2-deoxy-b eta-D-galactopyranosyl]oxy]-1-oxopentyl]amino]propyl]amino] -3-oxopropoxy]methyl]-1,12,19,25-tetraoxo-16-oxa-13,20,24-t riazanonacos-1-yl]-4-hydroxy-2-pyrrolidinyl)methyl ester
cctctcaaaacctacataatt

SEQ ID NO: 5878 - RNA, 21 nt, synthetic construct
  source 1..21: mol_type = other RNA
  modified_base 1: mod_base = OTHER; note = 2'-O-methyladenosine-3'-phosphorothioate
  modified_base 2: mod_base = OTHER; note = 2'-O-methyluridine-3'-phosphorothioate
  modified_base 3: mod_base = OTHER; note = 2'-O-methyluridine-3'-phosphate
  modified_base 4: mod_base = OTHER; note = 2'-O-methylguanosine-3'-phosphate
  modified_base 5: mod_base = OTHER; note = 2'-O-methyluridine-3'-phosphate
  modified_base 6: mod_base = OTHER; note = 2'-O-methyladenosine-3'-phosphate
  modified_base 7: mod_base = OTHER; note = 2'-deoxy-2'-fluorouridine-3'-phosphate
  modified_base 8: mod_base = OTHER; note = 2'-O-methyluridine-3'-phosphate
  modified_base 9: mod_base = OTHER; note = 2'-deoxy-2'-fluorouridine-3'-phosphate
  modified_base 10: mod_base = OTHER; note = 2'-deoxy-2'-fluoroadenosine-3'-phosphate
  modified_base 11: mod_base = OTHER; note = 2'-deoxy-2'-fluorocytidine-3'-phosphate
  modified_base 12: mod_base = OTHER; note = 2'-O-methylcytidine-3'-phosphate
  modified_base 13: mod_base = OTHER; note = 2'-O-methyluridine-3'-phosphate
  modified_base 14: mod_base = OTHER; note = 2'-O-methylcytidine-3'-phosphate
  modified_base 15: mod_base = OTHER; note = 2'-O-methyluridine-3'-phosphate
  modified_base 16: mod_base = OTHER; note = 2'-O-methylcytidine-3'-phosphate
  modified_base 17: mod_base = OTHER; note = 2'-O-methylcytidine-3'-phosphate
  modified_base 18: mod_base = OTHER; note = 2'-O-methyluridine-3'-phosphate
  modified_base 19: mod_base = OTHER; note = 2'-O-methylguanosine-3'-phosphate
  modified_base 20: mod_base = OTHER; note = 2'-O-methyluridine-3'-phosphate
  modified_base 21: mod_base = OTHER; note = 2'-O-methyluridine-3'-phosphate ((2S,4R)-1-[29-[[2-(acetylamino)-2-deoxy-beta-D-galactopyra nosyl]oxy]-14,14-bis[[3-[[3-[[5-[[2-(acetylamino)-2-deoxy-b eta-D-galactopyranosyl]oxy]-1-oxopentyl]amino]propyl]amino] -3-oxopropoxy]methyl]-1,12,19,25-tetraoxo-16-oxa-13,20,24-t riazanonacos-1-yl]-4-hydroxy-2-pyrrolidinyl)methyl ester
attgtatttacctctcctgtt

SEQ ID NO: 5879 - RNA, 21 nt, synthetic construct
  source 1..21: mol_type = other RNA
  modified_base 1: mod_base = OTHER; note = 2'-O-methyladenosine-3'-phosphorothioate
  modified_base 2: mod_base = OTHER; note = 2'-O-methyladenosine-3'-phosphorothioate
  modified_base 3: mod_base = OTHER; note = 2'-O-methylcytidine-3'-phosphate
  modified_base 4: mod_base = OTHER; note = 2'-O-methylcytidine-3'-phosphate
  modified_base 5: mod_base = OTHER; note = 2'-O-methyladenosine-3'-phosphate
  modified_base 6: mod_base = OTHER; note = 2'-O-methylcytidine-3'-phosphate
  modified_base 7: mod_base = OTHER; note = 2'-deoxy-2'-fluoroadenosine-3'-phosphate
  modified_base 8: mod_base = OTHER; note = 2'-O-methyluridine-3'-phosphate
  modified_base 9: mod_base = OTHER; note = 2'-deoxy-2'-fluorouridine-3'-phosphate
  modified_base 10: mod_base = OTHER; note = 2'-deoxy-2'-fluoroguanosine-3'-phosphate
  modified_base 11: mod_base = OTHER; note = 2'-deoxy-2'-fluorouridine-3'-phosphate
  modified_base 12: mod_base = OTHER; note = 2'-O-methyluridine-3'-phosphate
  modified_base 13: mod_base = OTHER; note = 2'-O-methyluridine-3'-phosphate
  modified_base 14: mod_base = OTHER; note = 2'-O-methyluridine-3'-phosphate
  modified_base 15: mod_base = OTHER; note = 2'-O-methylguanosine-3'-phosphate
  modified_base 16: mod_base = OTHER; note = 2'-O-methyladenosine-3'-phosphate
  modified_base 17: mod_base = OTHER; note = 2'-O-methyladenosine-3'-phosphate
  modified_base 18: mod_base = OTHER; note = 2'-O-methyladenosine-3'-phosphate
  modified_base 19: mod_base = OTHER; note = 2'-O-methyladenosine-3'-phosphate
  modified_base 20: mod_base = OTHER; note = 2'-O-methyluridine-3'-phosphate
  modified_base 21: mod_base = OTHER; note = 2'-O-methyluridine-3'-phosphate ((2S,4R)-1-[29-[[2-(acetylamino)-2-deoxy-beta-D-galactopyra nosyl]oxy]-14,14-bis[[3-[[3-[[5-[[2-(acetylamino)-2-deoxy-b eta-D-galactopyranosyl]oxy]-1-oxopentyl]amino]propyl]amino] -3-oxopropoxy]methyl]-1,12,19,25-tetraoxo-16-oxa-13,20,24-t riazanonacos-1-yl]-4-hydroxy-2-pyrrolidinyl)methyl ester
aaccacattgttttgaaaatt

SEQ ID NO: 5880 - RNA, 21 nt, synthetic construct
  source 1..21: mol_type = other RNA
  modified_base 1: mod_base = OTHER; note = 2'-O-methyluridine-3'-phosphorothioate
  modified_base 2: mod_base = OTHER; note = 2'-O-methyluridine-3'-phosphorothioate
  modified_base 3: mod_base = OTHER; note = 2'-O-methyluridine-3'-phosphate
  modified_base 4: mod_base = OTHER; note = 2'-O-methylcytidine-3'-phosphate
  modified_base 5: mod_base = OTHER; note = 2'-O-methyluridine-3'-phosphate
  modified_base 6: mod_base = OTHER; note = 2'-O-methyladenosine-3'-phosphate
  modified_base 7: mod_base = OTHER; note = 2'-deoxy-2'-fluorouridine-3'-phosphate
  modified_base 8: mod_base = OTHER; note = 2'-O-methyluridine-3'-phosphate
  modified_base 9: mod_base = OTHER; note = 2'-deoxy-2'-fluorouridine-3'-phosphate
  modified_base 10: mod_base = OTHER; note = 2'-deoxy-2'-fluoroguanosine-3'-phosphate
  modified_base 11: mod_base = OTHER; note = 2'-deoxy-2'-fluorouridine-3'-phosphate
  modified_base 12: mod_base = OTHER; note = 2'-O-methylguanosine-3'-phosphate
  modified_base 13: mod_base = OTHER; note = 2'-O-methyluridine-3'-phosphate
  modified_base 14: mod_base = OTHER; note = 2'-O-methylcytidine-3'-phosphate
  modified_base 15: mod_base = OTHER; note = 2'-O-methyluridine-3'-phosphate
  modified_base 16: mod_base = OTHER; note = 2'-O-methylcytidine-3'-phosphate
  modified_base 17: mod_base = OTHER; note = 2'-O-methylcytidine-3'-phosphate
  modified_base 18: mod_base = OTHER; note = 2'-O-methyluridine-3'-phosphate
  modified_base 19: mod_base = OTHER; note = 2'-O-methylcytidine-3'-phosphate
  modified_base 20: mod_base = OTHER; note = 2'-O-methyluridine-3'-phosphate
  modified_base 21: mod_base = OTHER; note = 2'-O-methyluridine-3'-phosphate ((2S,4R)-1-[29-[[2-(acetylamino)-2-deoxy-beta-D-galactopyra nosyl]oxy]-14,14-bis[[3-[[3-[[5-[[2-(acetylamino)-2-deoxy-b eta-D-galactopyranosyl]oxy]-1-oxopentyl]amino]propyl]amino] -3-oxopropoxy]methyl]-1,12,19,25-tetraoxo-16-oxa-13,20,24-t riazanonacos-1-yl]-4-hydroxy-2-pyrrolidinyl)methyl ester
tttctatttgtgtctcctctt

SEQ ID NO: 5881 - RNA, 21 nt, synthetic construct
  source 1..21: mol_type = other RNA
  modified_base 1: mod_base = OTHER; note = 2'-O-methylcytidine-3'-phosphorothioate
  modified_base 2: mod_base = OTHER; note = 2'-O-methyluridine-3'-phosphorothioate
  modified_base 3: mod_base = OTHER; note = 2'-O-methylcytidine-3'-phosphate
  modified_base 4: mod_base = OTHER; note = 2'-O-methyluridine-3'-phosphate
  modified_base 5: mod_base = OTHER; note = 2'-O-methyladenosine-3'-phosphate
  modified_base 6: mod_base = OTHER; note = 2'-O-methylcytidine-3'-phosphate
  modified_base 7: mod_base = OTHER; note = 2'-deoxy-2'-fluorouridine-3'-phosphate
  modified_base 8: mod_base = OTHER; note = 2'-O-methylguanosine-3'-phosphate
  modified_base 9: mod_base = OTHER; note = 2'-deoxy-2'-fluorocytidine-3'-phosphate
  modified_base 10: mod_base = OTHER; note = 2'-deoxy-2'-fluoroadenosine-3'-phosphate
  modified_base 11: mod_base = OTHER; note = 2'-deoxy-2'-fluoroguanosine-3'-phosphate
  modified_base 12: mod_base = OTHER; note = 2'-O-methyluridine-3'-phosphate
  modified_base 13: mod_base = OTHER; note = 2'-O-methyladenosine-3'-phosphate
  modified_base 14: mod_base = OTHER; note = 2'-O-methyluridine-3'-phosphate
  modified_base 15: mod_base = OTHER; note = 2'-O-methyladenosine-3'-phosphate
  modified_base 16: mod_base = OTHER; note = 2'-O-methyladenosine-3'-phosphate
  modified_base 17: mod_base = OTHER; note = 2'-O-methyluridine-3'-phosphate
  modified_base 18: mod_base = OTHER; note = 2'-O-methylguanosine-3'-phosphate
  modified_base 19: mod_base = OTHER; note = 2'-O-methyluridine-3'-phosphate
  modified_base 20: mod_base = OTHER; note = 2'-O-methylcytidine-3'-phosphate
  modified_base 21: mod_base = OTHER; note = 2'-O-methyluridine-3'-phosphate ((2S,4R)-1-[29-[[2-(acetylamino)-2-deoxy-beta-D-galactopyra nosyl]oxy]-14,14-bis[[3-[[3-[[5-[[2-(acetylamino)-2-deoxy-b eta-D-galactopyranosyl]oxy]-1-oxopentyl]amino]propyl]amino] -3-oxopropoxy]methyl]-1,12,19,25-tetraoxo-16-oxa-13,20,24-t riazanonacos-1-yl]-4-hydroxy-2-pyrrolidinyl)methyl ester
ctctactgcagtataatgtct

SEQ ID NO: 5882 - RNA, 21 nt, synthetic construct
  source 1..21: mol_type = other RNA
  modified_base 1: mod_base = OTHER; note = 2'-O-methylguanosine-3'-phosphorothioate
  modified_base 2: mod_base = OTHER; note = 2'-O-methyluridine-3'-phosphorothioate
  modified_base 3: mod_base = OTHER; note = 2'-O-methylguanosine-3'-phosphate
  modified_base 4: mod_base = OTHER; note = 2'-O-methyluridine-3'-phosphate
  modified_base 5: mod_base = OTHER; note = 2'-O-methyladenosine-3'-phosphate
  modified_base 6: mod_base = OTHER; note = 2'-O-methyluridine-3'-phosphate
  modified_base 7: mod_base = OTHER; note = 2'-deoxy-2'-fluorouridine-3'-phosphate
  modified_base 8: mod_base = OTHER; note = 2'-O-methylcytidine-3'-phosphate
  modified_base 9: mod_base = OTHER; note = 2'-deoxy-2'-fluoroadenosine-3'-phosphate
  modified_base 10: mod_base = OTHER; note = 2'-deoxy-2'-fluorouridine-3'-phosphate
  modified_base 11: mod_base = OTHER; note = 2'-deoxy-2'-fluorocytidine-3'-phosphate
  modified_base 12: mod_base = OTHER; note = 2'-O-methyladenosine-3'-phosphate
  modified_base 13: mod_base = OTHER; note = 2'-O-methyluridine-3'-phosphate
  modified_base 14: mod_base = OTHER; note = 2'-O-methyluridine-3'-phosphate
  modified_base 15: mod_base = OTHER; note = 2'-O-methylguanosine-3'-phosphate
  modified_base 16: mod_base = OTHER; note = 2'-O-methylcytidine-3'-phosphate
  modified_base 17: mod_base = OTHER; note = 2'-O-methyladenosine-3'-phosphate
  modified_base 18: mod_base = OTHER; note = 2'-O-methyluridine-3'-phosphate
  modified_base 19: mod_base = OTHER; note = 2'-O-methyluridine-3'-phosphate
  modified_base 20: mod_base = OTHER; note = 2'-O-methylcytidine-3'-phosphate
  modified_base 21: mod_base = OTHER; note = 2'-O-methyluridine-3'-phosphate ((2S,4R)-1-[29-[[2-(acetylamino)-2-deoxy-beta-D-galactopyra nosyl]oxy]-14,14-bis[[3-[[3-[[5-[[2-(acetylamino)-2-deoxy-b eta-D-galactopyranosyl]oxy]-1-oxopentyl]amino]propyl]amino] -3-oxopropoxy]methyl]-1,12,19,25-tetraoxo-16-oxa-13,20,24-t riazanonacos-1-yl]-4-hydroxy-2-pyrrolidinyl)methyl ester
gtgtattcatcattgcattct

SEQ ID NO: 5883 - RNA, 21 nt, synthetic construct
  source 1..21: mol_type = other RNA
  modified_base 1: mod_base = OTHER; note = 2'-O-methyladenosine-3'-phosphorothioate
  modified_base 2: mod_base = OTHER; note = 2'-O-methyluridine-3'-phosphorothioate
  modified_base 3: mod_base = OTHER; note = 2'-O-methylguanosine-3'-phosphate
  modified_base 4: mod_base = OTHER; note = 2'-O-methylguanosine-3'-phosphate
  modified_base 5: mod_base = OTHER; note = 2'-O-methyladenosine-3'-phosphate
  modified_base 6: mod_base = OTHER; note = 2'-O-methylguanosine-3'-phosphate
  modified_base 7: mod_base = OTHER; note = 2'-deoxy-2'-fluoroadenosine-3'-phosphate
  modified_base 8: mod_base = OTHER; note = 2'-O-methyluridine-3'-phosphate
  modified_base 9: mod_base = OTHER; note = 2'-deoxy-2'-fluoroadenosine-3'-phosphate
  modified_base 10: mod_base = OTHER; note = 2'-deoxy-2'-fluorouridine-3'-phosphate
  modified_base 11: mod_base = OTHER; note = 2'-deoxy-2'-fluorocytidine-3'-phosphate
  modified_base 12: mod_base = OTHER; note = 2'-O-methyladenosine-3'-phosphate
  modified_base 13: mod_base = OTHER; note = 2'-O-methyluridine-3'-phosphate
  modified_base 14: mod_base = OTHER; note = 2'-O-methyluridine-3'-phosphate
  modified_base 15: mod_base = OTHER; note = 2'-O-methylguanosine-3'-phosphate
  modified_base 16: mod_base = OTHER; note = 2'-O-methyladenosine-3'-phosphate
  modified_base 17: mod_base = OTHER; note = 2'-O-methyluridine-3'-phosphate
  modified_base 18: mod_base = OTHER; note = 2'-O-methyladenosine-3'-phosphate
  modified_base 19: mod_base = OTHER; note = 2'-O-methyladenosine-3'-phosphate
  modified_base 20: mod_base = OTHER; note = 2'-O-methyladenosine-3'-phosphate
  modified_base 21: mod_base = OTHER; note = 2'-O-methyluridine-3'-phosphate ((2S,4R)-1-[29-[[2-(acetylamino)-2-deoxy-beta-D-galactopyra nosyl]oxy]-14,14-bis[[3-[[3-[[5-[[2-(acetylamino)-2-deoxy-b eta-D-galactopyranosyl]oxy]-1-oxopentyl]amino]propyl]amino] -3-oxopropoxy]methyl]-1,12,19,25-tetraoxo-16-oxa-13,20,24-t riazanonacos-1-yl]-4-hydroxy-2-pyrrolidinyl)methyl ester
atggagatatcattgataaat

SEQ ID NO: 5884 - RNA, 21 nt, synthetic construct
  source 1..21: mol_type = other RNA
  modified_base 1: mod_base = OTHER; note = 2'-O-methylguanosine-3'-phosphorothioate
  modified_base 2: mod_base = OTHER; note = 2'-O-methylcytidine-3'-phosphorothioate
  modified_base 3: mod_base = OTHER; note = 2'-O-methylcytidine-3'-phosphate
  modified_base 4: mod_base = OTHER; note = 2'-O-methylcytidine-3'-phosphate
  modified_base 5: mod_base = OTHER; note = 2'-O-methyluridine-3'-phosphate
  modified_base 6: mod_base = OTHER; note = 2'-O-methyluridine-3'-phosphate
  modified_base 7: mod_base = OTHER; note = 2'-deoxy-2'-fluorouridine-3'-phosphate
  modified_base 8: mod_base = OTHER; note = 2'-O-methyluridine-3'-phosphate
  modified_base 9: mod_base = OTHER; note = 2'-deoxy-2'-fluoroguanosine-3'-phosphate
  modified_base 10: mod_base = OTHER; note = 2'-deoxy-2'-fluoroadenosine-3'-phosphate
  modified_base 11: mod_base = OTHER; note = 2'-deoxy-2'-fluorouridine-3'-phosphate
  modified_base 12: mod_base = OTHER; note = 2'-O-methyladenosine-3'-phosphate
  modified_base 13: mod_base = OTHER; note = 2'-O-methyladenosine-3'-phosphate
  modified_base 14: mod_base = OTHER; note = 2'-O-methylcytidine-3'-phosphate
  modified_base 15: mod_base = OTHER; note = 2'-O-methyladenosine-3'-phosphate
  modified_base 16: mod_base = OTHER; note = 2'-O-methylguanosine-3'-phosphate
  modified_base 17: mod_base = OTHER; note = 2'-O-methyladenosine-3'-phosphate
  modified_base 18: mod_base = OTHER; note = 2'-O-methyladenosine-3'-phosphate
  modified_base 19: mod_base = OTHER; note = 2'-O-methylguanosine-3'-phosphate
  modified_base 20: mod_base = OTHER; note = 2'-O-methylcytidine-3'-phosphate
  modified_base 21: mod_base = OTHER; note = 2'-O-methyluridine-3'-phosphate ((2S,4R)-1-[29-[[2-(acetylamino)-2-deoxy-beta-D-galactopyra nosyl]oxy]-14,14-bis[[3-[[3-[[5-[[2-(acetylamino)-2-deoxy-b eta-D-galactopyranosyl]oxy]-1-oxopentyl]amino]propyl]amino] -3-oxopropoxy]methyl]-1,12,19,25-tetraoxo-16-oxa-13,20,24-t riazanonacos-1-yl]-4-hydroxy-2-pyrrolidinyl)methyl ester
gcccttttgataacagaagct

SEQ ID NO: 5885 - RNA, 21 nt, synthetic construct
  source 1..21: mol_type = other RNA
  modified_base 1: mod_base = OTHER; note = 2'-O-methylcytidine-3'-phosphorothioate
  modified_base 2: mod_base = OTHER; note = 2'-O-methyladenosine-3'-phosphorothioate
  modified_base 3: mod_base = OTHER; note = 2'-O-methylguanosine-3'-phosphate
  modified_base 4: mod_base = OTHER; note = 2'-O-methyladenosine-3'-phosphate
  modified_base 5: mod_base = OTHER; note = 2'-O-methyluridine-3'-phosphate
  modified_base 6: mod_base = OTHER; note = 2'-O-methyladenosine-3'-phosphate
  modified_base 7: mod_base = OTHER; note = 2'-deoxy-2'-fluoroguanosine-3'-phosphate
  modified_base 8: mod_base = OTHER; note = 2'-O-methyluridine-3'-phosphate
  modified_base 9: mod_base = OTHER; note = 2'-deoxy-2'-fluorocytidine-3'-phosphate
  modified_base 10: mod_base = OTHER; note = 2'-deoxy-2'-fluorocytidine-3'-phosphate
  modified_base 11: mod_base = OTHER; note = 2'-deoxy-2'-fluorouridine-3'-phosphate
  modified_base 12: mod_base = OTHER; note = 2'-O-methyluridine-3'-phosphate
  modified_base 13: mod_base = OTHER; note = 2'-O-methylguanosine-3'-phosphate
  modified_base 14: mod_base = OTHER; note = 2'-O-methyluridine-3'-phosphate
  modified_base 15: mod_base = OTHER; note = 2'-O-methyluridine-3'-phosphate
  modified_base 16: mod_base = OTHER; note = 2'-O-methyluridine-3'-phosphate
  modified_base 17: mod_base = OTHER; note = 2'-O-methyluridine-3'-phosphate
  modified_base 18: mod_base = OTHER; note = 2'-O-methyladenosine-3'-phosphate
  modified_base 19: mod_base = OTHER; note = 2'-O-methyladenosine-3'-phosphate
  modified_base 20: mod_base = OTHER; note = 2'-O-methyluridine-3'-phosphate
  modified_base 21: mod_base = OTHER; note = 2'-O-methyluridine-3'-phosphate ((2S,4R)-1-[29-[[2-(acetylamino)-2-deoxy-beta-D-galactopyra nosyl]oxy]-14,14-bis[[3-[[3-[[5-[[2-(acetylamino)-2-deoxy-b eta-D-galactopyranosyl]oxy]-1-oxopentyl]amino]propyl]amino] -3-oxopropoxy]methyl]-1,12,19,25-tetraoxo-16-oxa-13,20,24-t riazanonacos-1-yl]-4-hydroxy-2-pyrrolidinyl)methyl ester
cagatagtccttgttttaatt

SEQ ID NO: 5886 - RNA, 21 nt, synthetic construct
  source 1..21: mol_type = other RNA
  modified_base 1: mod_base = OTHER; note = 2'-O-methylcytidine-3'-phosphorothioate
  modified_base 2: mod_base = OTHER; note = 2'-O-methyladenosine-3'-phosphorothioate
  modified_base 3: mod_base = OTHER; note = 2'-O-methylcytidine-3'-phosphate
  modified_base 4: mod_base = OTHER; note = 2'-O-methylcytidine-3'-phosphate
  modified_base 5: mod_base = OTHER; note = 2'-O-methyladenosine-3'-phosphate
  modified_base 6: mod_base = OTHER; note = 2'-O-methylcytidine-3'-phosphate
  modified_base 7: mod_base = OTHER; note = 2'-deoxy-2'-fluorouridine-3'-phosphate
  modified_base 8: mod_base = OTHER; note = 2'-O-methylguanosine-3'-phosphate
  modified_base 9: mod_base = OTHER; note = 2'-deoxy-2'-fluorouridine-3'-phosphate
  modified_base 10: mod_base = OTHER; note = 2'-deoxy-2'-fluorocytidine-3'-phosphate
  modified_base 11: mod_base = OTHER; note = 2'-deoxy-2'-fluorouridine-3'-phosphate
  modified_base 12: mod_base = OTHER; note = 2'-O-methyluridine-3'-phosphate
  modified_base 13: mod_base = OTHER; note = 2'-O-methylguanosine-3'-phosphate
  modified_base 14: mod_base = OTHER; note = 2'-O-methyladenosine-3'-phosphate
  modified_base 15: mod_base = OTHER; note = 2'-O-methyluridine-3'-phosphate
  modified_base 16: mod_base = OTHER; note = 2'-O-methylguanosine-3'-phosphate
  modified_base 17: mod_base = OTHER; note = 2'-O-methylcytidine-3'-phosphate
  modified_base 18: mod_base = OTHER; note = 2'-O-methyluridine-3'-phosphate
  modified_base 19: mod_base = OTHER; note = 2'-O-methylcytidine-3'-phosphate
  modified_base 20: mod_base = OTHER; note = 2'-O-methyluridine-3'-phosphate
  modified_base 21: mod_base = OTHER; note = 2'-O-methyluridine-3'-phosphate ((2S,4R)-1-[29-[[2-(acetylamino)-2-deoxy-beta-D-galactopyra nosyl]oxy]-14,14-bis[[3-[[3-[[5-[[2-(acetylamino)-2-deoxy-b eta-D-galactopyranosyl]oxy]-1-oxopentyl]amino]propyl]amino] -3-oxopropoxy]methyl]-1,12,19,25-tetraoxo-16-oxa-13,20,24-t riazanonacos-1-yl]-4-hydroxy-2-pyrrolidinyl)methyl ester
caccactgtcttgatgctctt

SEQ ID NO: 5887 - RNA, 21 nt, synthetic construct
  source 1..21: mol_type = other RNA
  modified_base 1: mod_base = OTHER; note = 2'-O-methyluridine-3'-phosphorothioate
  modified_base 2: mod_base = OTHER; note = 2'-O-methylcytidine-3'-phosphorothioate
  modified_base 3: mod_base = OTHER; note = 2'-O-methyluridine-3'-phosphate
  modified_base 4: mod_base = OTHER; note = 2'-O-methylguanosine-3'-phosphate
  modified_base 5: mod_base = OTHER; note = 2'-O-methyladenosine-3'-phosphate
  modified_base 6: mod_base = OTHER; note = 2'-O-methylguanosine-3'-phosphate
  modified_base 7: mod_base = OTHER; note = 2'-deoxy-2'-fluorocytidine-3'-phosphate
  modified_base 8: mod_base = OTHER; note = 2'-O-methyladenosine-3'-phosphate
  modified_base 9: mod_base = OTHER; note = 2'-deoxy-2'-fluoroadenosine-3'-phosphate
  modified_base 10: mod_base = OTHER; note = 2'-deoxy-2'-fluoroguanosine-3'-phosphate
  modified_base 11: mod_base = OTHER; note = 2'-deoxy-2'-fluorouridine-3'-phosphate
  modified_base 12: mod_base = OTHER; note = 2'-O-methyluridine-3'-phosphate
  modified_base 13: mod_base = OTHER; note = 2'-O-methyladenosine-3'-phosphate
  modified_base 14: mod_base = OTHER; note = 2'-O-methylcytidine-3'-phosphate
  modified_base 15: mod_base = OTHER; note = 2'-O-methylcytidine-3'-phosphate
  modified_base 16: mod_base = OTHER; note = 2'-O-methyluridine-3'-phosphate
  modified_base 17: mod_base = OTHER; note = 2'-O-methylcytidine-3'-phosphate
  modified_base 18: mod_base = OTHER; note = 2'-O-methyluridine-3'-phosphate
  modified_base 19: mod_base = OTHER; note = 2'-O-methyluridine-3'-phosphate
  modified_base 20: mod_base = OTHER; note = 2'-O-methylcytidine-3'-phosphate
  modified_base 21: mod_base = OTHER; note = 2'-O-methyluridine-3'-phosphate ((2S,4R)-1-[29-[[2-(acetylamino)-2-deoxy-beta-D-galactopyra nosyl]oxy]-14,14-bis[[3-[[3-[[5-[[2-(acetylamino)-2-deoxy-b eta-D-galactopyranosyl]oxy]-1-oxopentyl]amino]propyl]amino] -3-oxopropoxy]methyl]-1,12,19,25-tetraoxo-16-oxa-13,20,24-t riazanonacos-1-yl]-4-hydroxy-2-pyrrolidinyl)methyl ester
tctgagcaagttacctcttct

SEQ ID NO: 5888 - RNA, 21 nt, synthetic construct
  source 1..21: mol_type = other RNA
  modified_base 1: mod_base = OTHER; note = 2'-O-methyluridine-3'-phosphorothioate
  modified_base 2: mod_base = OTHER; note = 2'-O-methylcytidine-3'-phosphorothioate
  modified_base 3: mod_base = OTHER; note = 2'-O-methylcytidine-3'-phosphate
  modified_base 4: mod_base = OTHER; note = 2'-O-methylcytidine-3'-phosphate
  modified_base 5: mod_base = OTHER; note = 2'-O-methyluridine-3'-phosphate
  modified_base 6: mod_base = OTHER; note = 2'-O-methylcytidine-3'-phosphate
  modified_base 7: mod_base = OTHER; note = 2'-deoxy-2'-fluorouridine-3'-phosphate
  modified_base 8: mod_base = OTHER; note = 2'-O-methylguanosine-3'-phosphate
  modified_base 9: mod_base = OTHER; note = 2'-deoxy-2'-fluoroadenosine-3'-phosphate
  modified_base 10: mod_base = OTHER; note = 2'-deoxy-2'-fluorocytidine-3'-phosphate
  modified_base 11: mod_base = OTHER; note = 2'-deoxy-2'-fluorocytidine-3'-phosphate
  modified_base 12: mod_base = OTHER; note = 2'-O-methylcytidine-3'-phosphate
  modified_base 13: mod_base = OTHER; note = 2'-O-methyluridine-3'-phosphate
  modified_base 14: mod_base = OTHER; note = 2'-O-methylcytidine-3'-phosphate
  modified_base 15: mod_base = OTHER; note = 2'-O-methyladenosine-3'-phosphate
  modified_base 16: mod_base = OTHER; note = 2'-O-methylguanosine-3'-phosphate
  modified_base 17: mod_base = OTHER; note = 2'-O-methyluridine-3'-phosphate
  modified_base 18: mod_base = OTHER; note = 2'-O-methyluridine-3'-phosphate
  modified_base 19: mod_base = OTHER; note = 2'-O-methyluridine-3'-phosphate
  modified_base 20: mod_base = OTHER; note = 2'-O-methylcytidine-3'-phosphate
  modified_base 21: mod_base = OTHER; note = 2'-O-methyluridine-3'-phosphate ((2S,4R)-1-[29-[[2-(acetylamino)-2-deoxy-beta-D-galactopyra nosyl]oxy]-14,14-bis[[3-[[3-[[5-[[2-(acetylamino)-2-deoxy-b eta-D-galactopyranosyl]oxy]-1-oxopentyl]amino]propyl]amino] -3-oxopropoxy]methyl]-1,12,19,25-tetraoxo-16-oxa-13,20,24-t riazanonacos-1-yl]-4-hydroxy-2-pyrrolidinyl)methyl ester
tccctctgaccctcagtttct

SEQ ID NO: 5889 - RNA, 21 nt, synthetic construct
  source 1..21: mol_type = other RNA
  modified_base 1: mod_base = OTHER; note = 2'-O-methylguanosine-3'-phosphorothioate
  modified_base 2: mod_base = OTHER; note = 2'-O-methyluridine-3'-phosphorothioate
  modified_base 3: mod_base = OTHER; note = 2'-O-methyluridine-3'-phosphate
  modified_base 4: mod_base = OTHER; note = 2'-O-methyluridine-3'-phosphate
  modified_base 5: mod_base = OTHER; note = 2'-O-methylcytidine-3'-phosphate
  modified_base 6: mod_base = OTHER; note = 2'-O-methylcytidine-3'-phosphate
  modified_base 7: mod_base = OTHER; note = 2'-deoxy-2'-fluoroadenosine-3'-phosphate
  modified_base 8: mod_base = OTHER; note = 2'-O-methyluridine-3'-phosphate
  modified_base 9: mod_base = OTHER; note = 2'-deoxy-2'-fluoroadenosine-3'-phosphate
  modified_base 10: mod_base = OTHER; note = 2'-deoxy-2'-fluorouridine-3'-phosphate
  modified_base 11: mod_base = OTHER; note = 2'-deoxy-2'-fluorouridine-3'-phosphate
  modified_base 12: mod_base = OTHER; note = 2'-O-methyluridine-3'-phosphate
  modified_base 13: mod_base = OTHER; note = 2'-O-methylguanosine-3'-phosphate
  modified_base 14: mod_base = OTHER; note = 2'-O-methyluridine-3'-phosphate
  modified_base 15: mod_base = OTHER; note = 2'-O-methyladenosine-3'-phosphate
  modified_base 16: mod_base = OTHER; note = 2'-O-methyladenosine-3'-phosphate
  modified_base 17: mod_base = OTHER; note = 2'-O-methyladenosine-3'-phosphate
  modified_base 18: mod_base = OTHER; note = 2'-O-methyladenosine-3'-phosphate
  modified_base 19: mod_base = OTHER; note = 2'-O-methyluridine-3'-phosphate
  modified_base 20: mod_base = OTHER; note = 2'-O-methylguanosine-3'-phosphate
  modified_base 21: mod_base = OTHER; note = 2'-O-methyluridine-3'-phosphate ((2S,4R)-1-[29-[[2-(acetylamino)-2-deoxy-beta-D-galactopyra nosyl]oxy]-14,14-bis[[3-[[3-[[5-[[2-(acetylamino)-2-deoxy-b eta-D-galactopyranosyl]oxy]-1-oxopentyl]amino]propyl]amino] -3-oxopropoxy]methyl]-1,12,19,25-tetraoxo-16-oxa-13,20,24-t riazanonacos-1-yl]-4-hydroxy-2-pyrrolidinyl)methyl ester
gtttccatatttgtaaaatgt

SEQ ID NO: 5890 - RNA, 21 nt, synthetic construct
  source 1..21: mol_type = other RNA
  modified_base 1: mod_base = OTHER; note = 2'-O-methyladenosine-3'-phosphorothioate
  modified_base 2: mod_base = OTHER; note = 2'-O-methyluridine-3'-phosphorothioate
  modified_base 3: mod_base = OTHER; note = 2'-O-methylguanosine-3'-phosphate
  modified_base 4: mod_base = OTHER; note = 2'-O-methyladenosine-3'-phosphate
  modified_base 5: mod_base = OTHER; note = 2'-O-methylguanosine-3'-phosphate
  modified_base 6: mod_base = OTHER; note = 2'-O-methyladenosine-3'-phosphate
  modified_base 7: mod_base = OTHER; note = 2'-deoxy-2'-fluoroadenosine-3'-phosphate
  modified_base 8: mod_base = OTHER; note = 2'-O-methyluridine-3'-phosphate
  modified_base 9: mod_base = OTHER; note = 2'-deoxy-2'-fluoroadenosine-3'-phosphate
  modified_base 10: mod_base = OTHER; note = 2'-deoxy-2'-fluoroadenosine-3'-phosphate
  modified_base 11: mod_base = OTHER; note = 2'-deoxy-2'-fluoroadenosine-3'-phosphate
  modified_base 12: mod_base = OTHER; note = 2'-O-methylcytidine-3'-phosphate
  modified_base 13: mod_base = OTHER; note = 2'-O-methyladenosine-3'-phosphate
  modified_base 14: mod_base = OTHER; note = 2'-O-methyluridine-3'-phosphate
  modified_base 15: mod_base = OTHER; note = 2'-O-methyladenosine-3'-phosphate
  modified_base 16: mod_base = OTHER; note = 2'-O-methylcytidine-3'-phosphate
  modified_base 17: mod_base = OTHER; note = 2'-O-methylcytidine-3'-phosphate
  modified_base 18: mod_base = OTHER; note = 2'-O-methyladenosine-3'-phosphate
  modified_base 19: mod_base = OTHER; note = 2'-O-methyladenosine-3'-phosphate
  modified_base 20: mod_base = OTHER; note = 2'-O-methylcytidine-3'-phosphate
  modified_base 21: mod_base = OTHER; note = 2'-O-methyluridine-3'-phosphate ((2S,4R)-1-[29-[[2-(acetylamino)-2-deoxy-beta-D-galactopyra nosyl]oxy]-14,14-bis[[3-[[3-[[5-[[2-(acetylamino)-2-deoxy-b eta-D-galactopyranosyl]oxy]-1-oxopentyl]amino]propyl]amino] -3-oxopropoxy]methyl]-1,12,19,25-tetraoxo-16-oxa-13,20,24-t riazanonacos-1-yl]-4-hydroxy-2-pyrrolidinyl)methyl ester
atgagaataaacataccaact

SEQ ID NO: 5891 - RNA, 21 nt, synthetic construct
  source 1..21: mol_type = other RNA
  modified_base 1: mod_base = OTHER; note = 2'-O-methyladenosine-3'-phosphorothioate
  modified_base 2: mod_base = OTHER; note = 2'-O-methyladenosine-3'-phosphorothioate
  modified_base 3: mod_base = OTHER; note = 2'-O-methylcytidine-3'-phosphate
  modified_base 4: mod_base = OTHER; note = 2'-O-methyluridine-3'-phosphate
  modified_base 5: mod_base = OTHER; note = 2'-O-methyluridine-3'-phosphate
  modified_base 6: mod_base = OTHER; note = 2'-O-methyladenosine-3'-phosphate
  modified_base 7: mod_base = OTHER; note = 2'-deoxy-2'-fluoroadenosine-3'-phosphate
  modified_base 8: mod_base = OTHER; note = 2'-O-methyluridine-3'-phosphate
  modified_base 9: mod_base = OTHER; note = 2'-deoxy-2'-fluoroadenosine-3'-phosphate
  modified_base 10: mod_base = OTHER; note = 2'-deoxy-2'-fluoroadenosine-3'-phosphate
  modified_base 11: mod_base = OTHER; note = 2'-deoxy-2'-fluoroadenosine-3'-phosphate
  modified_base 12: mod_base = OTHER; note = 2'-O-methylguanosine-3'-phosphate
  modified_base 13: mod_base = OTHER; note = 2'-O-methyladenosine-3'-phosphate
  modified_base 14: mod_base = OTHER; note = 2'-O-methyluridine-3'-phosphate
  modified_base 15: mod_base = OTHER; note = 2'-O-methyladenosine-3'-phosphate
  modified_base 16: mod_base = OTHER; note = 2'-O-methyluridine-3'-phosphate
  modified_base 17: mod_base = OTHER; note = 2'-O-methyluridine-3'-phosphate
  modified_base 18: mod_base = OTHER; note = 2'-O-methylguanosine-3'-phosphate
  modified_base 19: mod_base = OTHER; note = 2'-O-methyluridine-3'-phosphate
  modified_base 20: mod_base = OTHER; note = 2'-O-methylguanosine-3'-phosphate
  modified_base 21: mod_base = OTHER; note = 2'-O-methyluridine-3'-phosphate ((2S,4R)-1-[29-[[2-(acetylamino)-2-deoxy-beta-D-galactopyra nosyl]oxy]-14,14-bis[[3-[[3-[[5-[[2-(acetylamino)-2-deoxy-b eta-D-galactopyranosyl]oxy]-1-oxopentyl]amino]propyl]amino] -3-oxopropoxy]methyl]-1,12,19,25-tetraoxo-16-oxa-13,20,24-t riazanonacos-1-yl]-4-hydroxy-2-pyrrolidinyl)methyl ester
aacttaataaagatattgtgt

SEQ ID NO: 5892 - RNA, 21 nt, synthetic construct
  source 1..21: mol_type = other RNA
  modified_base 1: mod_base = OTHER; note = 2'-O-methylguanosine-3'-phosphorothioate
  modified_base 2: mod_base = OTHER; note = 2'-O-methyladenosine-3'-phosphorothioate
  modified_base 3: mod_base = OTHER; note = 2'-O-methylcytidine-3'-phosphate
  modified_base 4: mod_base = OTHER; note = 2'-O-methyluridine-3'-phosphate
  modified_base 5: mod_base = OTHER; note = 2'-O-methyladenosine-3'-phosphate
  modified_base 6: mod_base = OTHER; note = 2'-O-methylguanosine-3'-phosphate
  modified_base 7: mod_base = OTHER; note = 2'-deoxy-2'-fluoroadenosine-3'-phosphate
  modified_base 8: mod_base = OTHER; note = 2'-O-methyladenosine-3'-phosphate
  modified_base 9: mod_base = OTHER; note = 2'-deoxy-2'-fluorouridine-3'-phosphate
  modified_base 10: mod_base = OTHER; note = 2'-deoxy-2'-fluoroguanosine-3'-phosphate
  modified_base 11: mod_base = OTHER; note = 2'-deoxy-2'-fluoroadenosine-3'-phosphate
  modified_base 12: mod_base = OTHER; note = 2'-O-methyluridine-3'-phosphate
  modified_base 13: mod_base = OTHER; note = 2'-O-methyladenosine-3'-phosphate
  modified_base 14: mod_base = OTHER; note = 2'-O-methyluridine-3'-phosphate
  modified_base 15: mod_base = OTHER; note = 2'-O-methyluridine-3'-phosphate
  modified_base 16: mod_base = OTHER; note = 2'-O-methyluridine-3'-phosphate
  modified_base 17: mod_base = OTHER; note = 2'-O-methylguanosine-3'-phosphate
  modified_base 18: mod_base = OTHER; note = 2'-O-methyladenosine-3'-phosphate
  modified_base 19: mod_base = OTHER; note = 2'-O-methyluridine-3'-phosphate
  modified_base 20: mod_base = OTHER; note = 2'-O-methyladenosine-3'-phosphate
  modified_base 21: mod_base = OTHER; note = 2'-O-methyluridine-3'-phosphate ((2S,4R)-1-[29-[[2-(acetylamino)-2-deoxy-beta-D-galactopyra nosyl]oxy]-14,14-bis[[3-[[3-[[5-[[2-(acetylamino)-2-deoxy-b eta-D-galactopyranosyl]oxy]-1-oxopentyl]amino]propyl]amino] -3-oxopropoxy]methyl]-1,12,19,25-tetraoxo-16-oxa-13,20,24-t riazanonacos-1-yl]-4-hydroxy-2-pyrrolidinyl)methyl ester
gactagaatgatatttgatat

SEQ ID NO: 5893 - RNA, 21 nt, synthetic construct
  source 1..21: mol_type = other RNA
  modified_base 1: mod_base = OTHER; note = 2'-O-methyladenosine-3'-phosphorothioate
  modified_base 2: mod_base = OTHER; note = 2'-O-methylguanosine-3'-phosphorothioate
  modified_base 3: mod_base = OTHER; note = 2'-O-methyladenosine-3'-phosphate
  modified_base 4: mod_base = OTHER; note = 2'-O-methyladenosine-3'-phosphate
  modified_base 5: mod_base = OTHER; note = 2'-O-methyladenosine-3'-phosphate
  modified_base 6: mod_base = OTHER; note = 2'-O-methyluridine-3'-phosphate
  modified_base 7: mod_base = OTHER; note = 2'-deoxy-2'-fluorouridine-3'-phosphate
  modified_base 8: mod_base = OTHER; note = 2'-O-methyladenosine-3'-phosphate
  modified_base 9: mod_base = OTHER; note = 2'-deoxy-2'-fluoroadenosine-3'-phosphate
  modified_base 10: mod_base = OTHER; note = 2'-deoxy-2'-fluoroadenosine-3'-phosphate
  modified_base 11: mod_base = OTHER; note = 2'-deoxy-2'-fluorouridine-3'-phosphate
  modified_base 12: mod_base = OTHER; note = 2'-O-methylguanosine-3'-phosphate
  modified_base 13: mod_base = OTHER; note = 2'-O-methylguanosine-3'-phosphate
  modified_base 14: mod_base = OTHER; note = 2'-O-methyluridine-3'-phosphate
  modified_base 15: mod_base = OTHER; note = 2'-O-methyladenosine-3'-phosphate
  modified_base 16: mod_base = OTHER; note = 2'-O-methylguanosine-3'-phosphate
  modified_base 17: mod_base = OTHER; note = 2'-O-methylcytidine-3'-phosphate
  modified_base 18: mod_base = OTHER; note = 2'-O-methyladenosine-3'-phosphate
  modified_base 19: mod_base = OTHER; note = 2'-O-methylguanosine-3'-phosphate
  modified_base 20: mod_base = OTHER; note = 2'-O-methyluridine-3'-phosphate
  modified_base 21: mod_base = OTHER; note = 2'-O-methyluridine-3'-phosphate ((2S,4R)-1-[29-[[2-(acetylamino)-2-deoxy-beta-D-galactopyra nosyl]oxy]-14,14-bis[[3-[[3-[[5-[[2-(acetylamino)-2-deoxy-b eta-D-galactopyranosyl]oxy]-1-oxopentyl]amino]propyl]amino] -3-oxopropoxy]methyl]-1,12,19,25-tetraoxo-16-oxa-13,20,24-t riazanonacos-1-yl]-4-hydroxy-2-pyrrolidinyl)methyl ester
agaaattaaatggtagcagtt

SEQ ID NO: 5894 - RNA, 21 nt, synthetic construct
  source 1..21: mol_type = other RNA
  modified_base 1: mod_base = OTHER; note = 2'-O-methylguanosine-3'-phosphorothioate
  modified_base 2: mod_base = OTHER; note = 2'-O-methylcytidine-3'-phosphorothioate
  modified_base 3: mod_base = OTHER; note = 2'-O-methyladenosine-3'-phosphate
  modified_base 4: mod_base = OTHER; note = 2'-O-methylguanosine-3'-phosphate
  modified_base 5: mod_base = OTHER; note = 2'-O-methyluridine-3'-phosphate
  modified_base 6: mod_base = OTHER; note = 2'-O-methyladenosine-3'-phosphate
  modified_base 7: mod_base = OTHER; note = 2'-deoxy-2'-fluorouridine-3'-phosphate
  modified_base 8: mod_base = OTHER; note = 2'-O-methyladenosine-3'-phosphate
  modified_base 9: mod_base = OTHER; note = 2'-deoxy-2'-fluoroadenosine-3'-phosphate
  modified_base 10: mod_base = OTHER; note = 2'-deoxy-2'-fluorocytidine-3'-phosphate
  modified_base 11: mod_base = OTHER; note = 2'-deoxy-2'-fluorouridine-3'-phosphate
  modified_base 12: mod_base = OTHER; note = 2'-O-methyladenosine-3'-phosphate
  modified_base 13: mod_base = OTHER; note = 2'-O-methyluridine-3'-phosphate
  modified_base 14: mod_base = OTHER; note = 2'-O-methyluridine-3'-phosphate
  modified_base 15: mod_base = OTHER; note = 2'-O-methylcytidine-3'-phosphate
  modified_base 16: mod_base = OTHER; note = 2'-O-methyluridine-3'-phosphate
  modified_base 17: mod_base = OTHER; note = 2'-O-methylguanosine-3'-phosphate
  modified_base 18: mod_base = OTHER; note = 2'-O-methyladenosine-3'-phosphate
  modified_base 19: mod_base = OTHER; note = 2'-O-methyluridine-3'-phosphate
  modified_base 20: mod_base = OTHER; note = 2'-O-methylcytidine-3'-phosphate
  modified_base 21: mod_base = OTHER; note = 2'-O-methyluridine-3'-phosphate ((2S,4R)-1-[29-[[2-(acetylamino)-2-deoxy-beta-D-galactopyra nosyl]oxy]-14,14-bis[[3-[[3-[[5-[[2-(acetylamino)-2-deoxy-b eta-D-galactopyranosyl]oxy]-1-oxopentyl]amino]propyl]amino] -3-oxopropoxy]methyl]-1,12,19,25-tetraoxo-16-oxa-13,20,24-t riazanonacos-1-yl]-4-hydroxy-2-pyrrolidinyl)methyl ester
gcagtataactattctgatct

SEQ ID NO: 5895 - RNA, 21 nt, synthetic construct
  source 1..21: mol_type = other RNA
  modified_base 1: mod_base = OTHER; note = 2'-O-methylcytidine-3'-phosphorothioate
  modified_base 2: mod_base = OTHER; note = 2'-O-methyladenosine-3'-phosphorothioate
  modified_base 3: mod_base = OTHER; note = 2'-O-methylcytidine-3'-phosphate
  modified_base 4: mod_base = OTHER; note = 2'-O-methyluridine-3'-phosphate
  modified_base 5: mod_base = OTHER; note = 2'-O-methylguanosine-3'-phosphate
  modified_base 6: mod_base = OTHER; note = 2'-O-methyladenosine-3'-phosphate
  modified_base 7: mod_base = OTHER; note = 2'-deoxy-2'-fluorocytidine-3'-phosphate
  modified_base 8: mod_base = OTHER; note = 2'-O-methyladenosine-3'-phosphate
  modified_base 9: mod_base = OTHER; note = 2'-deoxy-2'-fluorouridine-3'-phosphate
  modified_base 10: mod_base = OTHER; note = 2'-deoxy-2'-fluorouridine-3'-phosphate
  modified_base 11: mod_base = OTHER; note = 2'-deoxy-2'-fluoroadenosine-3'-phosphate
  modified_base 12: mod_base = OTHER; note = 2'-O-methyladenosine-3'-phosphate
  modified_base 13: mod_base = OTHER; note = 2'-O-methyluridine-3'-phosphate
  modified_base 14: mod_base = OTHER; note = 2'-O-methyladenosine-3'-phosphate
  modified_base 15: mod_base = OTHER; note = 2'-O-methyluridine-3'-phosphate
  modified_base 16: mod_base = OTHER; note = 2'-O-methyluridine-3'-phosphate
  modified_base 17: mod_base = OTHER; note = 2'-O-methylcytidine-3'-phosphate
  modified_base 18: mod_base = OTHER; note = 2'-O-methylcytidine-3'-phosphate
  modified_base 19: mod_base = OTHER; note = 2'-O-methyluridine-3'-phosphate
  modified_base 20: mod_base = OTHER; note = 2'-O-methyladenosine-3'-phosphate
  modified_base 21: mod_base = OTHER; note = 2'-O-methyluridine-3'-phosphate ((2S,4R)-1-[29-[[2-(acetylamino)-2-deoxy-beta-D-galactopyra nosyl]oxy]-14,14-bis[[3-[[3-[[5-[[2-(acetylamino)-2-deoxy-b eta-D-galactopyranosyl]oxy]-1-oxopentyl]amino]propyl]amino] -3-oxopropoxy]methyl]-1,12,19,25-tetraoxo-16-oxa-13,20,24-t riazanonacos-1-yl]-4-hydroxy-2-pyrrolidinyl)methyl ester
cactgacattaatattcctat

SEQ ID NO: 5896 - RNA, 21 nt, synthetic construct
  source 1..21: mol_type = other RNA
  modified_base 1: mod_base = OTHER; note = 2'-O-methyluridine-3'-phosphorothioate
  modified_base 2: mod_base = OTHER; note = 2'-O-methylguanosine-3'-phosphorothioate
  modified_base 3: mod_base = OTHER; note = 2'-O-methyluridine-3'-phosphate
  modified_base 4: mod_base = OTHER; note = 2'-O-methyluridine-3'-phosphate
  modified_base 5: mod_base = OTHER; note = 2'-O-methyladenosine-3'-phosphate
  modified_base 6: mod_base = OTHER; note = 2'-O-methyluridine-3'-phosphate
  modified_base 7: mod_base = OTHER; note = 2'-deoxy-2'-fluorouridine-3'-phosphate
  modified_base 8: mod_base = OTHER; note = 2'-O-methyladenosine-3'-phosphate
  modified_base 9: mod_base = OTHER; note = 2'-deoxy-2'-fluorouridine-3'-phosphate
  modified_base 10: mod_base = OTHER; note = 2'-deoxy-2'-fluorouridine-3'-phosphate
  modified_base 11: mod_base = OTHER; note = 2'-deoxy-2'-fluorocytidine-3'-phosphate
  modified_base 12: mod_base = OTHER; note = 2'-O-methyluridine-3'-phosphate
  modified_base 13: mod_base = OTHER; note = 2'-O-methyluridine-3'-phosphate
  modified_base 14: mod_base = OTHER; note = 2'-O-methyluridine-3'-phosphate
  modified_base 15: mod_base = OTHER; note = 2'-O-methylguanosine-3'-phosphate
  modified_base 16: mod_base = OTHER; note = 2'-O-methylcytidine-3'-phosphate
  modified_base 17: mod_base = OTHER; note = 2'-O-methyluridine-3'-phosphate
  modified_base 18: mod_base = OTHER; note = 2'-O-methylcytidine-3'-phosphate
  modified_base 19: mod_base = OTHER; note = 2'-O-methyladenosine-3'-phosphate
  modified_base 20: mod_base = OTHER; note = 2'-O-methylcytidine-3'-phosphate
  modified_base 21: mod_base = OTHER; note = 2'-O-methyluridine-3'-phosphate ((2S,4R)-1-[29-[[2-(acetylamino)-2-deoxy-beta-D-galactopyra nosyl]oxy]-14,14-bis[[3-[[3-[[5-[[2-(acetylamino)-2-deoxy-b eta-D-galactopyranosyl]oxy]-1-oxopentyl]amino]propyl]amino] -3-oxopropoxy]methyl]-1,12,19,25-tetraoxo-16-oxa-13,20,24-t riazanonacos-1-yl]-4-hydroxy-2-pyrrolidinyl)methyl ester
tgttattattctttgctcact

SEQ ID NO: 5897 - RNA, 21 nt, synthetic construct
  source 1..21: mol_type = other RNA
  modified_base 1: mod_base = OTHER; note = 2'-O-methyladenosine-3'-phosphorothioate
  modified_base 2: mod_base = OTHER; note = 2'-O-methylcytidine-3'-phosphorothioate
  modified_base 3: mod_base = OTHER; note = 2'-O-methyladenosine-3'-phosphate
  modified_base 4: mod_base = OTHER; note = 2'-O-methyladenosine-3'-phosphate
  modified_base 5: mod_base = OTHER; note = 2'-O-methylcytidine-3'-phosphate
  modified_base 6: mod_base = OTHER; note = 2'-O-methyluridine-3'-phosphate
  modified_base 7: mod_base = OTHER; note = 2'-deoxy-2'-fluorocytidine-3'-phosphate
  modified_base 8: mod_base = OTHER; note = 2'-O-methyluridine-3'-phosphate
  modified_base 9: mod_base = OTHER; note = 2'-deoxy-2'-fluorouridine-3'-phosphate
  modified_base 10: mod_base = OTHER; note = 2'-deoxy-2'-fluoroguanosine-3'-phosphate
  modified_base 11: mod_base = OTHER; note = 2'-deoxy-2'-fluorouridine-3'-phosphate
  modified_base 12: mod_base = OTHER; note = 2'-O-methyluridine-3'-phosphate
  modified_base 13: mod_base = OTHER; note = 2'-O-methyluridine-3'-phosphate
  modified_base 14: mod_base = OTHER; note = 2'-O-methyluridine-3'-phosphate
  modified_base 15: mod_base = OTHER; note = 2'-O-methylguanosine-3'-phosphate
  modified_base 16: mod_base = OTHER; note = 2'-O-methylcytidine-3'-phosphate
  modified_base 17: mod_base = OTHER; note = 2'-O-methyluridine-3'-phosphate
  modified_base 18: mod_base = OTHER; note = 2'-O-methylguanosine-3'-phosphate
  modified_base 19: mod_base = OTHER; note = 2'-O-methyluridine-3'-phosphate
  modified_base 20: mod_base = OTHER; note = 2'-O-methyluridine-3'-phosphate
  modified_base 21: mod_base = OTHER; note = 2'-O-methyluridine-3'-phosphate ((2S,4R)-1-[29-[[2-(acetylamino)-2-deoxy-beta-D-galactopyra nosyl]oxy]-14,14-bis[[3-[[3-[[5-[[2-(acetylamino)-2-deoxy-b eta-D-galactopyranosyl]oxy]-1-oxopentyl]amino]propyl]amino] -3-oxopropoxy]methyl]-1,12,19,25-tetraoxo-16-oxa-13,20,24-t riazanonacos-1-yl]-4-hydroxy-2-pyrrolidinyl)methyl ester
acaactcttgttttgctgttt

SEQ ID NO: 5898 - RNA, 21 nt, synthetic construct
  source 1..21: mol_type = other RNA
  modified_base 1: mod_base = OTHER; note = 2'-O-methylguanosine-3'-phosphorothioate
  modified_base 2: mod_base = OTHER; note = 2'-O-methylcytidine-3'-phosphorothioate
  modified_base 3: mod_base = OTHER; note = 2'-O-methylcytidine-3'-phosphate
  modified_base 4: mod_base = OTHER; note = 2'-O-methylcytidine-3'-phosphate
  modified_base 5: mod_base = OTHER; note = 2'-O-methyluridine-3'-phosphate
  modified_base 6: mod_base = OTHER; note = 2'-O-methylcytidine-3'-phosphate
  modified_base 7: mod_base = OTHER; note = 2'-deoxy-2'-fluorouridine-3'-phosphate
  modified_base 8: mod_base = OTHER; note = 2'-O-methyluridine-3'-phosphate
  modified_base 9: mod_base = OTHER; note = 2'-deoxy-2'-fluorouridine-3'-phosphate
  modified_base 10: mod_base = OTHER; note = 2'-deoxy-2'-fluoroadenosine-3'-phosphate
  modified_base 11: mod_base = OTHER; note = 2'-deoxy-2'-fluorouridine-3'-phosphate
  modified_base 12: mod_base = OTHER; note = 2'-O-methylguanosine-3'-phosphate
  modified_base 13: mod_base = OTHER; note = 2'-O-methyluridine-3'-phosphate
  modified_base 14: mod_base = OTHER; note = 2'-O-methyladenosine-3'-phosphate
  modified_base 15: mod_base = OTHER; note = 2'-O-methylguanosine-3'-phosphate
  modified_base 16: mod_base = OTHER; note = 2'-O-methylguanosine-3'-phosphate
  modified_base 17: mod_base = OTHER; note = 2'-O-methyluridine-3'-phosphate
  modified_base 18: mod_base = OTHER; note = 2'-O-methyluridine-3'-phosphate
  modified_base 19: mod_base = OTHER; note = 2'-O-methyluridine-3'-phosphate
  modified_base 20: mod_base = OTHER; note = 2'-O-methyladenosine-3'-phosphate
  modified_base 21: mod_base = OTHER; note = 2'-O-methyluridine-3'-phosphate ((2S,4R)-1-[29-[[2-(acetylamino)-2-deoxy-beta-D-galactopyra nosyl]oxy]-14,14-bis[[3-[[3-[[5-[[2-(acetylamino)-2-deoxy-b eta-D-galactopyranosyl]oxy]-1-oxopentyl]amino]propyl]amino] -3-oxopropoxy]methyl]-1,12,19,25-tetraoxo-16-oxa-13,20,24-t riazanonacos-1-yl]-4-hydroxy-2-pyrrolidinyl)methyl ester
gccctctttatgtaggtttat

SEQ ID NO: 5899 - RNA, 21 nt, synthetic construct
  source 1..21: mol_type = other RNA
  modified_base 1: mod_base = OTHER; note = 2'-O-methyladenosine-3'-phosphorothioate
  modified_base 2: mod_base = OTHER; note = 2'-O-methyluridine-3'-phosphorothioate
  modified_base 3: mod_base = OTHER; note = 2'-O-methyladenosine-3'-phosphate
  modified_base 4: mod_base = OTHER; note = 2'-O-methylcytidine-3'-phosphate
  modified_base 5: mod_base = OTHER; note = 2'-O-methyluridine-3'-phosphate
  modified_base 6: mod_base = OTHER; note = 2'-O-methylcytidine-3'-phosphate
  modified_base 7: mod_base = OTHER; note = 2'-deoxy-2'-fluoroguanosine-3'-phosphate
  modified_base 8: mod_base = OTHER; note = 2'-O-methylguanosine-3'-phosphate
  modified_base 9: mod_base = OTHER; note = 2'-deoxy-2'-fluoroadenosine-3'-phosphate
  modified_base 10: mod_base = OTHER; note = 2'-deoxy-2'-fluorocytidine-3'-phosphate
  modified_base 11: mod_base = OTHER; note = 2'-deoxy-2'-fluorouridine-3'-phosphate
  modified_base 12: mod_base = OTHER; note = 2'-O-methylcytidine-3'-phosphate
  modified_base 13: mod_base = OTHER; note = 2'-O-methyladenosine-3'-phosphate
  modified_base 14: mod_base = OTHER; note = 2'-O-methyladenosine-3'-phosphate
  modified_base 15: mod_base = OTHER; note = 2'-O-methyladenosine-3'-phosphate
  modified_base 16: mod_base = OTHER; note = 2'-O-methyluridine-3'-phosphate
  modified_base 17: mod_base = OTHER; note = 2'-O-methylguanosine-3'-phosphate
  modified_base 18: mod_base = OTHER; note = 2'-O-methyluridine-3'-phosphate
  modified_base 19: mod_base = OTHER; note = 2'-O-methylcytidine-3'-phosphate
  modified_base 20: mod_base = OTHER; note = 2'-O-methyluridine-3'-phosphate
  modified_base 21: mod_base = OTHER; note = 2'-O-methyluridine-3'-phosphate ((2S,4R)-1-[29-[[2-(acetylamino)-2-deoxy-beta-D-galactopyra nosyl]oxy]-14,14-bis[[3-[[3-[[5-[[2-(acetylamino)-2-deoxy-b eta-D-galactopyranosyl]oxy]-1-oxopentyl]amino]propyl]amino] -3-oxopropoxy]methyl]-1,12,19,25-tetraoxo-16-oxa-13,20,24-t riazanonacos-1-yl]-4-hydroxy-2-pyrrolidinyl)methyl ester
atactcggactcaaatgtctt

SEQ ID NO: 5900 - RNA, 21 nt, synthetic construct
  source 1..21: mol_type = other RNA
  modified_base 1: mod_base = OTHER; note = 2'-O-methyladenosine-3'-phosphorothioate
  modified_base 2: mod_base = OTHER; note = 2'-O-methylcytidine-3'-phosphorothioate
  modified_base 3: mod_base = OTHER; note = 2'-O-methyladenosine-3'-phosphate
  modified_base 4: mod_base = OTHER; note = 2'-O-methylcytidine-3'-phosphate
  modified_base 5: mod_base = OTHER; note = 2'-O-methylcytidine-3'-phosphate
  modified_base 6: mod_base = OTHER; note = 2'-O-methyladenosine-3'-phosphate
  modified_base 7: mod_base = OTHER; note = 2'-deoxy-2'-fluoroadenosine-3'-phosphate
  modified_base 8: mod_base = OTHER; note = 2'-O-methyladenosine-3'-phosphate
  modified_base 9: mod_base = OTHER; note = 2'-deoxy-2'-fluorouridine-3'-phosphate
  modified_base 10: mod_base = OTHER; note = 2'-deoxy-2'-fluoroguanosine-3'-phosphate
  modified_base 11: mod_base = OTHER; note = 2'-deoxy-2'-fluoroadenosine-3'-phosphate
  modified_base 12: mod_base = OTHER; note = 2'-O-methyladenosine-3'-phosphate
  modified_base 13: mod_base = OTHER; note = 2'-O-methylguanosine-3'-phosphate
  modified_base 14: mod_base = OTHER; note = 2'-O-methyluridine-3'-phosphate
  modified_base 15: mod_base = OTHER; note = 2'-O-methylguanosine-3'-phosphate
  modified_base 16: mod_base = OTHER; note = 2'-O-methylguanosine-3'-phosphate
  modified_base 17: mod_base = OTHER; note = 2'-O-methyluridine-3'-phosphate
  modified_base 18: mod_base = OTHER; note = 2'-O-methylcytidine-3'-phosphate
  modified_base 19: mod_base = OTHER; note = 2'-O-methyladenosine-3'-phosphate
  modified_base 20: mod_base = OTHER; note = 2'-O-methyluridine-3'-phosphate
  modified_base 21: mod_base = OTHER; note = 2'-O-methyluridine-3'-phosphate ((2S,4R)-1-[29-[[2-(acetylamino)-2-deoxy-beta-D-galactopyra nosyl]oxy]-14,14-bis[[3-[[3-[[5-[[2-(acetylamino)-2-deoxy-b eta-D-galactopyranosyl]oxy]-1-oxopentyl]amino]propyl]amino] -3-oxopropoxy]methyl]-1,12,19,25-tetraoxo-16-oxa-13,20,24-t riazanonacos-1-yl]-4-hydroxy-2-pyrrolidinyl)methyl ester
acaccaaatgaagtggtcatt

SEQ ID NO: 5901 - RNA, 21 nt, synthetic construct
  source 1..21: mol_type = other RNA
  modified_base 1: mod_base = OTHER; note = 2'-O-methylguanosine-3'-phosphorothioate
  modified_base 2: mod_base = OTHER; note = 2'-O-methyluridine-3'-phosphorothioate
  modified_base 3: mod_base = OTHER; note = 2'-O-methyladenosine-3'-phosphate
  modified_base 4: mod_base = OTHER; note = 2'-O-methylguanosine-3'-phosphate
  modified_base 5: mod_base = OTHER; note = 2'-O-methylcytidine-3'-phosphate
  modified_base 6: mod_base = OTHER; note = 2'-O-methyladenosine-3'-phosphate
  modified_base 7: mod_base = OTHER; note = 2'-deoxy-2'-fluoroadenosine-3'-phosphate
  modified_base 8: mod_base = OTHER; note = 2'-O-methyladenosine-3'-phosphate
  modified_base 9: mod_base = OTHER; note = 2'-deoxy-2'-fluorouridine-3'-phosphate
  modified_base 10: mod_base = OTHER; note = 2'-deoxy-2'-fluorocytidine-3'-phosphate
  modified_base 11: mod_base = OTHER; note = 2'-deoxy-2'-fluoroadenosine-3'-phosphate
  modified_base 12: mod_base = OTHER; note = 2'-O-methylguanosine-3'-phosphate
  modified_base 13: mod_base = OTHER; note = 2'-O-methyluridine-3'-phosphate
  modified_base 14: mod_base = OTHER; note = 2'-O-methyladenosine-3'-phosphate
  modified_base 15: mod_base = OTHER; note = 2'-O-methyluridine-3'-phosphate
  modified_base 16: mod_base = OTHER; note = 2'-O-methyladenosine-3'-phosphate
  modified_base 17: mod_base = OTHER; note = 2'-O-methyluridine-3'-phosphate
  modified_base 18: mod_base = OTHER; note = 2'-O-methyluridine-3'-phosphate
  modified_base 19: mod_base = OTHER; note = 2'-O-methylcytidine-3'-phosphate
  modified_base 20: mod_base = OTHER; note = 2'-O-methyluridine-3'-phosphate
  modified_base 21: mod_base = OTHER; note = 2'-O-methyluridine-3'-phosphate ((2S,4R)-1-[29-[[2-(acetylamino)-2-deoxy-beta-D-galactopyra nosyl]oxy]-14,14-bis[[3-[[3-[[5-[[2-(acetylamino)-2-deoxy-b eta-D-galactopyranosyl]oxy]-1-oxopentyl]amino]propyl]amino] -3-oxopropoxy]methyl]-1,12,19,25-tetraoxo-16-oxa-13,20,24-t riazanonacos-1-yl]-4-hydroxy-2-pyrrolidinyl)methyl ester
gtagcaaatcagtatattctt

SEQ ID NO: 5902 - RNA, 21 nt, synthetic construct
  source 1..21: mol_type = other RNA
  modified_base 1: mod_base = OTHER; note = 2'-O-methylcytidine-3'-phosphorothioate
  modified_base 2: mod_base = OTHER; note = 2'-O-methyladenosine-3'-phosphorothioate
  modified_base 3: mod_base = OTHER; note = 2'-O-methyladenosine-3'-phosphate
  modified_base 4: mod_base = OTHER; note = 2'-O-methylguanosine-3'-phosphate
  modified_base 5: mod_base = OTHER; note = 2'-O-methylguanosine-3'-phosphate
  modified_base 6: mod_base = OTHER; note = 2'-O-methyladenosine-3'-phosphate
  modified_base 7: mod_base = OTHER; note = 2'-deoxy-2'-fluoroadenosine-3'-phosphate
  modified_base 8: mod_base = OTHER; note = 2'-O-methyluridine-3'-phosphate
  modified_base 9: mod_base = OTHER; note = 2'-deoxy-2'-fluoroadenosine-3'-phosphate
  modified_base 10: mod_base = OTHER; note = 2'-deoxy-2'-fluorouridine-3'-phosphate
  modified_base 11: mod_base = OTHER; note = 2'-deoxy-2'-fluorouridine-3'-phosphate
  modified_base 12: mod_base = OTHER; note = 2'-O-methyladenosine-3'-phosphate
  modified_base 13: mod_base = OTHER; note = 2'-O-methyladenosine-3'-phosphate
  modified_base 14: mod_base = OTHER; note = 2'-O-methyluridine-3'-phosphate
  modified_base 15: mod_base = OTHER; note = 2'-O-methylcytidine-3'-phosphate
  modified_base 16: mod_base = OTHER; note = 2'-O-methyluridine-3'-phosphate
  modified_base 17: mod_base = OTHER; note = 2'-O-methyluridine-3'-phosphate
  modified_base 18: mod_base = OTHER; note = 2'-O-methylcytidine-3'-phosphate
  modified_base 19: mod_base = OTHER; note = 2'-O-methyladenosine-3'-phosphate
  modified_base 20: mod_base = OTHER; note = 2'-O-methylcytidine-3'-phosphate
  modified_base 21: mod_base = OTHER; note = 2'-O-methyluridine-3'-phosphate ((2S,4R)-1-[29-[[2-(acetylamino)-2-deoxy-beta-D-galactopyra nosyl]oxy]-14,14-bis[[3-[[3-[[5-[[2-(acetylamino)-2-deoxy-b eta-D-galactopyranosyl]oxy]-1-oxopentyl]amino]propyl]amino] -3-oxopropoxy]methyl]-1,12,19,25-tetraoxo-16-oxa-13,20,24-t riazanonacos-1-yl]-4-hydroxy-2-pyrrolidinyl)methyl ester
caaggaatattaatcttcact

SEQ ID NO: 5903 - RNA, 21 nt, synthetic construct
  source 1..21: mol_type = other RNA
  modified_base 1: mod_base = OTHER; note = 2'-O-methyluridine-3'-phosphorothioate
  modified_base 2: mod_base = OTHER; note = 2'-O-methylcytidine-3'-phosphorothioate
  modified_base 3: mod_base = OTHER; note = 2'-O-methyladenosine-3'-phosphate
  modified_base 4: mod_base = OTHER; note = 2'-O-methylcytidine-3'-phosphate
  modified_base 5: mod_base = OTHER; note = 2'-O-methylcytidine-3'-phosphate
  modified_base 6: mod_base = OTHER; note = 2'-O-methylcytidine-3'-phosphate
  modified_base 7: mod_base = OTHER; note = 2'-deoxy-2'-fluoroadenosine-3'-phosphate
  modified_base 8: mod_base = OTHER; note = 2'-O-methyladenosine-3'-phosphate
  modified_base 9: mod_base = OTHER; note = 2'-deoxy-2'-fluoroadenosine-3'-phosphate
  modified_base 10: mod_base = OTHER; note = 2'-deoxy-2'-fluorouridine-3'-phosphate
  modified_base 11: mod_base = OTHER; note = 2'-deoxy-2'-fluorouridine-3'-phosphate
  modified_base 12: mod_base = OTHER; note = 2'-O-methyluridine-3'-phosphate
  modified_base 13: mod_base = OTHER; note = 2'-O-methyluridine-3'-phosphate
  modified_base 14: mod_base = OTHER; note = 2'-O-methylguanosine-3'-phosphate
  modified_base 15: mod_base = OTHER; note = 2'-O-methyladenosine-3'-phosphate
  modified_base 16: mod_base = OTHER; note = 2'-O-methyladenosine-3'-phosphate
  modified_base 17: mod_base = OTHER; note = 2'-O-methyluridine-3'-phosphate
  modified_base 18: mod_base = OTHER; note = 2'-O-methyluridine-3'-phosphate
  modified_base 19: mod_base = OTHER; note = 2'-O-methyluridine-3'-phosphate
  modified_base 20: mod_base = OTHER; note = 2'-O-methyluridine-3'-phosphate
  modified_base 21: mod_base = OTHER; note = 2'-O-methyluridine-3'-phosphate ((2S,4R)-1-[29-[[2-(acetylamino)-2-deoxy-beta-D-galactopyra nosyl]oxy]-14,14-bis[[3-[[3-[[5-[[2-(acetylamino)-2-deoxy-b eta-D-galactopyranosyl]oxy]-1-oxopentyl]amino]propyl]amino] -3-oxopropoxy]methyl]-1,12,19,25-tetraoxo-16-oxa-13,20,24-t riazanonacos-1-yl]-4-hydroxy-2-pyrrolidinyl)methyl ester
tcacccaaattttgaattttt

SEQ ID NO: 5904 - RNA, 21 nt, synthetic construct
  source 1..21: mol_type = other RNA
  modified_base 1: mod_base = OTHER; note = 2'-O-methylguanosine-3'-phosphorothioate
  modified_base 2: mod_base = OTHER; note = 2'-O-methyladenosine-3'-phosphorothioate
  modified_base 3: mod_base = OTHER; note = 2'-O-methylguanosine-3'-phosphate
  modified_base 4: mod_base = OTHER; note = 2'-O-methyluridine-3'-phosphate
  modified_base 5: mod_base = OTHER; note = 2'-O-methylguanosine-3'-phosphate
  modified_base 6: mod_base = OTHER; note = 2'-O-methyladenosine-3'-phosphate
  modified_base 7: mod_base = OTHER; note = 2'-deoxy-2'-fluorouridine-3'-phosphate
  modified_base 8: mod_base = OTHER; note = 2'-O-methyluridine-3'-phosphate
  modified_base 9: mod_base = OTHER; note = 2'-deoxy-2'-fluorouridine-3'-phosphate
  modified_base 10: mod_base = OTHER; note = 2'-deoxy-2'-fluorocytidine-3'-phosphate
  modified_base 11: mod_base = OTHER; note = 2'-deoxy-2'-fluoroadenosine-3'-phosphate
  modified_base 12: mod_base = OTHER; note = 2'-O-methyluridine-3'-phosphate
  modified_base 13: mod_base = OTHER; note = 2'-O-methyluridine-3'-phosphate
  modified_base 14: mod_base = OTHER; note = 2'-O-methylguanosine-3'-phosphate
  modified_base 15: mod_base = OTHER; note = 2'-O-methyladenosine-3'-phosphate
  modified_base 16: mod_base = OTHER; note = 2'-O-methyladenosine-3'-phosphate
  modified_base 17: mod_base = OTHER; note = 2'-O-methyluridine-3'-phosphate
  modified_base 18: mod_base = OTHER; note = 2'-O-methyladenosine-3'-phosphate
  modified_base 19: mod_base = OTHER; note = 2'-O-methyladenosine-3'-phosphate
  modified_base 20: mod_base = OTHER; note = 2'-O-methyladenosine-3'-phosphate
  modified_base 21: mod_base = OTHER; note = 2'-O-methyluridine-3'-phosphate ((2S,4R)-1-[29-[[2-(acetylamino)-2-deoxy-beta-D-galactopyra nosyl]oxy]-14,14-bis[[3-[[3-[[5-[[2-(acetylamino)-2-deoxy-b eta-D-galactopyranosyl]oxy]-1-oxopentyl]amino]propyl]amino] -3-oxopropoxy]methyl]-1,12,19,25-tetraoxo-16-oxa-13,20,24-t riazanonacos-1-yl]-4-hydroxy-2-pyrrolidinyl)methyl ester
gagtgatttcattgaataaat

SEQ ID NO: 5905 - RNA, 21 nt, synthetic construct
  source 1..21: mol_type = other RNA
  modified_base 1: mod_base = OTHER; note = 2'-O-methyladenosine-3'-phosphorothioate
  modified_base 2: mod_base = OTHER; note = 2'-O-methyluridine-3'-phosphorothioate
  modified_base 3: mod_base = OTHER; note = 2'-O-methyladenosine-3'-phosphate
  modified_base 4: mod_base = OTHER; note = 2'-O-methyladenosine-3'-phosphate
  modified_base 5: mod_base = OTHER; note = 2'-O-methyladenosine-3'-phosphate
  modified_base 6: mod_base = OTHER; note = 2'-O-methyladenosine-3'-phosphate
  modified_base 7: mod_base = OTHER; note = 2'-deoxy-2'-fluorouridine-3'-phosphate
  modified_base 8: mod_base = OTHER; note = 2'-O-methyluridine-3'-phosphate
  modified_base 9: mod_base = OTHER; note = 2'-deoxy-2'-fluorocytidine-3'-phosphate
  modified_base 10: mod_base = OTHER; note = 2'-deoxy-2'-fluorouridine-3'-phosphate
  modified_base 11: mod_base = OTHER; note = 2'-deoxy-2'-fluoroadenosine-3'-phosphate
  modified_base 12: mod_base = OTHER; note = 2'-O-methylcytidine-3'-phosphate
  modified_base 13: mod_base = OTHER; note = 2'-O-methyluridine-3'-phosphate
  modified_base 14: mod_base = OTHER; note = 2'-O-methylguanosine-3'-phosphate
  modified_base 15: mod_base = OTHER; note = 2'-O-methyladenosine-3'-phosphate
  modified_base 16: mod_base = OTHER; note = 2'-O-methylcytidine-3'-phosphate
  modified_base 17: mod_base = OTHER; note = 2'-O-methyluridine-3'-phosphate
  modified_base 18: mod_base = OTHER; note = 2'-O-methyluridine-3'-phosphate
  modified_base 19: mod_base = OTHER; note = 2'-O-methylcytidine-3'-phosphate
  modified_base 20: mod_base = OTHER; note = 2'-O-methyluridine-3'-phosphate
  modified_base 21: mod_base = OTHER; note = 2'-O-methyluridine-3'-phosphate ((2S,4R)-1-[29-[[2-(acetylamino)-2-deoxy-beta-D-galactopyra nosyl]oxy]-14,14-bis[[3-[[3-[[5-[[2-(acetylamino)-2-deoxy-b eta-D-galactopyranosyl]oxy]-1-oxopentyl]amino]propyl]amino] -3-oxopropoxy]methyl]-1,12,19,25-tetraoxo-16-oxa-13,20,24-t riazanonacos-1-yl]-4-hydroxy-2-pyrrolidinyl)methyl ester
ataaaattctactgacttctt

SEQ ID NO: 5906 - RNA, 23 nt, synthetic construct
  source 1..23: mol_type = other RNA
  modified_base 1: mod_base = OTHER; note = 2'-O-methyladenosine-3'-phosphorothioate
  modified_base 2: mod_base = OTHER; note = 2'-deoxy-2'-fluoroadenosine-3'-phosphorothioate
  modified_base 3: mod_base = OTHER; note = 2'-O-methylguanosine-3'-phosphate
  modified_base 4: mod_base = OTHER; note = 2'-O-methylcytidine-3'-phosphate
  modified_base 5: mod_base = OTHER; note = 2'-O-methyladenosine-3'-phosphate
  modified_base 6: mod_base = OTHER; note = 2'-deoxy-2'-fluoroguanosine-3'-phosphate
  modified_base 7: mod_base = OTHER; note = 2'-O-methylguanosine-3'-phosphate
  modified_base 8: mod_base = OTHER; note = 2'-deoxy-2'-fluoroadenosine-3'-phosphate
  modified_base 9: mod_base = OTHER; note = 2'-deoxy-2'-fluoroguanosine-3'-phosphate
  modified_base 10: mod_base = OTHER; note = 2'-O-methylguanosine-3'-phosphate
  modified_base 11: mod_base = OTHER; note = 2'-O-methyladenosine-3'-phosphate
  modified_base 12: mod_base = OTHER; note = 2'-O-methylguanosine-3'-phosphate
  modified_base 13: mod_base = OTHER; note = 2'-O-methyluridine-3'-phosphate
  modified_base 14: mod_base = OTHER; note = 2'-deoxy-2'-fluoroadenosine-3'-phosphate
  modified_base 15: mod_base = OTHER; note = 2'-O-methylguanosine-3'-phosphate
  modified_base 16: mod_base = OTHER; note = 2'-deoxy-2'-fluoroadenosine-3'-phosphate
  modified_base 17: mod_base = OTHER; note = 2'-O-methyladenosine-3'-phosphate
  modified_base 18: mod_base = OTHER; note = 2'-O-methylguanosine-3'-phosphate
  modified_base 19: mod_base = OTHER; note = 2'-O-methylcytidine-3'-phosphate
  modified_base 20: mod_base = OTHER; note = 2'-O-methyladenosine-3'-phosphate
  modified_base 21: mod_base = OTHER; note = 2'-O-methylguanosine-3'-phosphorothioate
  modified_base 22: mod_base = OTHER; note = 2'-O-methyladenosine-3'-phosphorothioate
  modified_base 23: mod_base = OTHER; note = 2'-O-methylguanosine
aagcaggaggagtagaagcagag

SEQ ID NO: 5907 - RNA, 23 nt, synthetic construct
  source 1..23: mol_type = other RNA
  modified_base 1: mod_base = OTHER; note = 2'-O-methyladenosine-3'-phosphorothioate
  modified_base 2: mod_base = OTHER; note = 2'-deoxy-2'-fluoroadenosine-3'-phosphorothioate
  modified_base 3: mod_base = OTHER; note = 2'-O-methylguanosine-3'-phosphate
  modified_base 4: mod_base = OTHER; note = 2'-O-methyluridine-3'-phosphate
  modified_base 5: mod_base = OTHER; note = 2'-O-methyluridine-3'-phosphate
  modified_base 6: mod_base = OTHER; note = 2'-deoxy-2'-fluoroguanosine-3'-phosphate
  modified_base 7: mod_base = OTHER; note = 2'-O-methylcytidine-3'-phosphate
  modified_base 8: mod_base = OTHER; note = 2'-deoxy-2'-fluoroguanosine-3'-phosphate
  modified_base 9: mod_base = OTHER; note = 2'-deoxy-2'-fluoroadenosine-3'-phosphate
  modified_base 10: mod_base = OTHER; note = 2'-O-methyladenosine-3'-phosphate
  modified_base 11: mod_base = OTHER; note = 2'-O-methyladenosine-3'-phosphate
  modified_base 12: mod_base = OTHER; note = 2'-O-methylcytidine-3'-phosphate
  modified_base 13: mod_base = OTHER; note = 2'-O-methylguanosine-3'-phosphate
  modified_base 14: mod_base = OTHER; note = 2'-deoxy-2'-fluoroadenosine-3'-phosphate
  modified_base 15: mod_base = OTHER; note = 2'-O-methyluridine-3'-phosphate
  modified_base 16: mod_base = OTHER; note = 2'-deoxy-2'-fluorocytidine-3'-phosphate
  modified_base 17: mod_base = OTHER; note = 2'-O-methylcytidine-3'-phosphate
  modified_base 18: mod_base = OTHER; note = 2'-O-methylguanosine-3'-phosphate
  modified_base 19: mod_base = OTHER; note = 2'-O-methylcytidine-3'-phosphate
  modified_base 20: mod_base = OTHER; note = 2'-O-methyladenosine-3'-phosphate
  modified_base 21: mod_base = OTHER; note = 2'-O-methylcytidine-3'-phosphorothioate
  modified_base 22: mod_base = OTHER; note = 2'-O-methyluridine-3'-phosphorothioate
  modified_base 23: mod_base = OTHER; note = 2'-O-methylguanosine
aagttgcgaaacgatccgcactg

SEQ ID NO: 5908 - RNA, 23 nt, synthetic construct
  source 1..23: mol_type = other RNA
  modified_base 1: mod_base = OTHER; note = 2'-O-methyladenosine-3'-phosphorothioate
  modified_base 2: mod_base = OTHER; note = 2'-deoxy-2'-fluoroguanosine-3'-phosphorothioate
  modified_base 3: mod_base = OTHER; note = 2'-O-methylguanosine-3'-phosphate
  modified_base 4: mod_base = OTHER; note = 2'-O-methyladenosine-3'-phosphate
  modified_base 5: mod_base = OTHER; note = 2'-O-methylcytidine-3'-phosphate
  modified_base 6: mod_base = OTHER; note = 2'-deoxy-2'-fluoroguanosine-3'-phosphate
  modified_base 7: mod_base = OTHER; note = 2'-O-methyladenosine-3'-phosphate
  modified_base 8: mod_base = OTHER; note = 2'-deoxy-2'-fluoroguanosine-3'-phosphate
  modified_base 9: mod_base = OTHER; note = 2'-deoxy-2'-fluorouridine-3'-phosphate
  modified_base 10: mod_base = OTHER; note = 2'-O-methylguanosine-3'-phosphate
  modified_base 11: mod_base = OTHER; note = 2'-O-methylguanosine-3'-phosphate
  modified_base 12: mod_base = OTHER; note = 2'-O-methylcytidine-3'-phosphate
  modified_base 13: mod_base = OTHER; note = 2'-O-methyladenosine-3'-phosphate
  modified_base 14: mod_base = OTHER; note = 2'-deoxy-2'-fluoroadenosine-3'-phosphate
  modified_base 15: mod_base = OTHER; note = 2'-O-methylguanosine-3'-phosphate
  modified_base 16: mod_base = OTHER; note = 2'-deoxy-2'-fluorocytidine-3'-phosphate
  modified_base 17: mod_base = OTHER; note = 2'-O-methyladenosine-3'-phosphate
  modified_base 18: mod_base = OTHER; note = 2'-O-methylguanosine-3'-phosphate
  modified_base 19: mod_base = OTHER; note = 2'-O-methyluridine-3'-phosphate
  modified_base 20: mod_base = OTHER; note = 2'-O-methyluridine-3'-phosphate
  modified_base 21: mod_base = OTHER; note = 2'-O-methylguanosine-3'-phosphorothioate
  modified_base 22: mod_base = OTHER; note = 2'-O-methylcytidine-3'-phosphorothioate
  modified_base 23: mod_base = OTHER; note = 2'-O-methylguanosine
aggacgagtggcaagcagttgcg

SEQ ID NO: 5909 - RNA, 23 nt, synthetic construct
  source 1..23: mol_type = other RNA
  modified_base 1: mod_base = OTHER; note = 2'-O-methyladenosine-3'-phosphorothioate
  modified_base 2: mod_base = OTHER; note = 2'-deoxy-2'-fluoroguanosine-3'-phosphorothioate
  modified_base 3: mod_base = OTHER; note = 2'-O-methylguanosine-3'-phosphate
  modified_base 4: mod_base = OTHER; note = 2'-O-methyladenosine-3'-phosphate
  modified_base 5: mod_base = OTHER; note = 2'-O-methyladenosine-3'-phosphate
  modified_base 6: mod_base = OTHER; note = 2'-deoxy-2'-fluoroadenosine-3'-phosphate
  modified_base 7: mod_base = OTHER; note = 2'-O-methyluridine-3'-phosphate
  modified_base 8: mod_base = OTHER; note = 2'-deoxy-2'-fluoroguanosine-3'-phosphate
  modified_base 9: mod_base = OTHER; note = 2'-deoxy-2'-fluoroguanosine-3'-phosphate
  modified_base 10: mod_base = OTHER; note = 2'-O-methyladenosine-3'-phosphate
  modified_base 11: mod_base = OTHER; note = 2'-O-methyladenosine-3'-phosphate
  modified_base 12: mod_base = OTHER; note = 2'-O-methyladenosine-3'-phosphate
  modified_base 13: mod_base = OTHER; note = 2'-O-methyladenosine-3'-phosphate
  modified_base 14: mod_base = OTHER; note = 2'-deoxy-2'-fluoroadenosine-3'-phosphate
  modified_base 15: mod_base = OTHER; note = 2'-O-methylcytidine-3'-phosphate
  modified_base 16: mod_base = OTHER; note = 2'-deoxy-2'-fluoroadenosine-3'-phosphate
  modified_base 17: mod_base = OTHER; note = 2'-O-methylguanosine-3'-phosphate
  modified_base 18: mod_base = OTHER; note = 2'-O-methylcytidine-3'-phosphate
  modified_base 19: mod_base = OTHER; note = 2'-O-methylcytidine-3'-phosphate
  modified_base 20: mod_base = OTHER; note = 2'-O-methyladenosine-3'-phosphate
  modified_base 21: mod_base = OTHER; note = 2'-O-methylguanosine-3'-phosphorothioate
  modified_base 22: mod_base = OTHER; note = 2'-O-methylguanosine-3'-phosphorothioate
  modified_base 23: mod_base = OTHER; note = 2'-O-methylcytidine
aggaaatggaaaaacagccaggc

SEQ ID NO: 5910 - RNA, 23 nt, synthetic construct
  source 1..23: mol_type = other RNA
  modified_base 1: mod_base = OTHER; note = 2'-O-methyladenosine-3'-phosphorothioate
  modified_base 2: mod_base = OTHER; note = 2'-deoxy-2'-fluoroguanosine-3'-phosphorothioate
  modified_base 3: mod_base = OTHER; note = 2'-O-methyladenosine-3'-phosphate
  modified_base 4: mod_base = OTHER; note = 2'-O-methylguanosine-3'-phosphate
  modified_base 5: mod_base = OTHER; note = 2'-O-methyladenosine-3'-phosphate
  modified_base 6: mod_base = OTHER; note = 2'-deoxy-2'-fluorouridine-3'-phosphate
  modified_base 7: mod_base = OTHER; note = 2'-O-methylguanosine-3'-phosphate
  modified_base 8: mod_base = OTHER; note = 2'-deoxy-2'-fluoroadenosine-3'-phosphate
  modified_base 9: mod_base = OTHER; note = 2'-deoxy-2'-fluorocytidine-3'-phosphate
  modified_base 10: mod_base = OTHER; note = 2'-O-methylcytidine-3'-phosphate
  modified_base 11: mod_base = OTHER; note = 2'-O-methyladenosine-3'-phosphate
  modified_base 12: mod_base = OTHER; note = 2'-O-methylguanosine-3'-phosphate
  modified_base 13: mod_base = OTHER; note = 2'-O-methyladenosine-3'-phosphate
  modified_base 14: mod_base = OTHER; note = 2'-deoxy-2'-fluoroadenosine-3'-phosphate
  modified_base 15: mod_base = OTHER; note = 2'-O-methyladenosine-3'-phosphate
  modified_base 16: mod_base = OTHER; note = 2'-deoxy-2'-fluoroguanosine-3'-phosphate
  modified_base 17: mod_base = OTHER; note = 2'-O-methylguanosine-3'-phosphate
  modified_base 18: mod_base = OTHER; note = 2'-O-methylguanosine-3'-phosphate
  modified_base 19: mod_base = OTHER; note = 2'-O-methyluridine-3'-phosphate
  modified_base 20: mod_base = OTHER; note = 2'-O-methylguanosine-3'-phosphate
  modified_base 21: mod_base = OTHER; note = 2'-O-methylguanosine-3'-phosphorothioate
  modified_base 22: mod_base = OTHER; note = 2'-O-methylcytidine-3'-phosphorothioate
  modified_base 23: mod_base = OTHER; note = 2'-O-methylguanosine
agagatgaccagaaagggtggcg

SEQ ID NO: 5911 - RNA, 23 nt, synthetic construct
  source 1..23: mol_type = other RNA
  modified_base 1: mod_base = OTHER; note = 2'-O-methyladenosine-3'-phosphorothioate
  modified_base 2: mod_base = OTHER; note = 2'-deoxy-2'-fluoroguanosine-3'-phosphorothioate
  modified_base 3: mod_base = OTHER; note = 2'-O-methylcytidine-3'-phosphate
  modified_base 4: mod_base = OTHER; note = 2'-O-methyladenosine-3'-phosphate
  modified_base 5: mod_base = OTHER; note = 2'-O-methylguanosine-3'-phosphate
  modified_base 6: mod_base = OTHER; note = 2'-deoxy-2'-fluoroguanosine-3'-phosphate
  modified_base 7: mod_base = OTHER; note = 2'-O-methyluridine-3'-phosphate
  modified_base 8: mod_base = OTHER; note = 2'-deoxy-2'-fluorouridine-3'-phosphate
  modified_base 9: mod_base = OTHER; note = 2'-deoxy-2'-fluoroguanosine-3'-phosphate
  modified_base 10: mod_base = OTHER; note = 2'-O-methyluridine-3'-phosphate
  modified_base 11: mod_base = OTHER; note = 2'-O-methylguanosine-3'-phosphate
  modified_base 12: mod_base = OTHER; note = 2'-O-methylguanosine-3'-phosphate
  modified_base 13: mod_base = OTHER; note = 2'-O-methyluridine-3'-phosphate
  modified_base 14: mod_base = OTHER; note = 2'-deoxy-2'-fluorocytidine-3'-phosphate
  modified_base 15: mod_base = OTHER; note = 2'-O-methylguanosine-3'-phosphate
  modified_base 16: mod_base = OTHER; note = 2'-deoxy-2'-fluoroadenosine-3'-phosphate
  modified_base 17: mod_base = OTHER; note = 2'-O-methyladenosine-3'-phosphate
  modified_base 18: mod_base = OTHER; note = 2'-O-methylguanosine-3'-phosphate
  modified_base 19: mod_base = OTHER; note = 2'-O-methylcytidine-3'-phosphate
  modified_base 20: mod_base = OTHER; note = 2'-O-methylcytidine-3'-phosphate
  modified_base 21: mod_base = OTHER; note = 2'-O-methyladenosine-3'-phosphorothioate
  modified_base 22: mod_base = OTHER; note = 2'-O-methyluridine-3'-phosphorothioate
  modified_base 23: mod_base = OTHER; note = 2'-O-methylcytidine
agcaggttgtggtcgaagccatc

SEQ ID NO: 5912 - RNA, 23 nt, synthetic construct
  source 1..23: mol_type = other RNA
  modified_base 1: mod_base = OTHER; note = 2'-O-methyladenosine-3'-phosphorothioate
  modified_base 2: mod_base = OTHER; note = 2'-deoxy-2'-fluorouridine-3'-phosphorothioate
  modified_base 3: mod_base = OTHER; note = 2'-O-methylcytidine-3'-phosphate
  modified_base 4: mod_base = OTHER; note = 2'-O-methylguanosine-3'-phosphate
  modified_base 5: mod_base = OTHER; note = 2'-O-methyladenosine-3'-phosphate
  modified_base 6: mod_base = OTHER; note = 2'-deoxy-2'-fluoroadenosine-3'-phosphate
  modified_base 7: mod_base = OTHER; note = 2'-O-methyladenosine-3'-phosphate
  modified_base 8: mod_base = OTHER; note = 2'-deoxy-2'-fluoroadenosine-3'-phosphate
  modified_base 9: mod_base = OTHER; note = 2'-deoxy-2'-fluoroguanosine-3'-phosphate
  modified_base 10: mod_base = OTHER; note = 2'-O-methylcytidine-3'-phosphate
  modified_base 11: mod_base = OTHER; note = 2'-O-methyluridine-3'-phosphate
  modified_base 12: mod_base = OTHER; note = 2'-O-methylguanosine-3'-phosphate
  modified_base 13: mod_base = OTHER; note = 2'-O-methyladenosine-3'-phosphate
  modified_base 14: mod_base = OTHER; note = 2'-deoxy-2'-fluorouridine-3'-phosphate
  modified_base 15: mod_base = OTHER; note = 2'-O-methyladenosine-3'-phosphate
  modified_base 16: mod_base = OTHER; note = 2'-deoxy-2'-fluorocytidine-3'-phosphate
  modified_base 17: mod_base = OTHER; note = 2'-O-methyluridine-3'-phosphate
  modified_base 18: mod_base = OTHER; note = 2'-O-methylcytidine-3'-phosphate
  modified_base 19: mod_base = OTHER; note = 2'-O-methylguanosine-3'-phosphate
  modified_base 20: mod_base = OTHER; note = 2'-O-methyluridine-3'-phosphate
  modified_base 21: mod_base = OTHER; note = 2'-O-methylcytidine-3'-phosphorothioate
  modified_base 22: mod_base = OTHER; note = 2'-O-methylcytidine-3'-phosphorothioate
  modified_base 23: mod_base = OTHER; note = 2'-O-methylguanosine
atcgaaaagctgatactcgtccg

SEQ ID NO: 5913 - RNA, 23 nt, synthetic construct
  source 1..23: mol_type = other RNA
  modified_base 1: mod_base = OTHER; note = 2'-O-methyladenosine-3'-phosphorothioate
  modified_base 2: mod_base = OTHER; note = 2'-deoxy-2'-fluoroguanosine-3'-phosphorothioate
  modified_base 3: mod_base = OTHER; note = 2'-O-methyluridine-3'-phosphate
  modified_base 4: mod_base = OTHER; note = 2'-O-methylcytidine-3'-phosphate
  modified_base 5: mod_base = OTHER; note = 2'-O-methylcytidine-3'-phosphate
  modified_base 6: mod_base = OTHER; note = 2'-deoxy-2'-fluoroadenosine-3'-phosphate
  modified_base 7: mod_base = OTHER; note = 2'-O-methylguanosine-3'-phosphate
  modified_base 8: mod_base = OTHER; note = 2'-deoxy-2'-fluorouridine-3'-phosphate
  modified_base 9: mod_base = OTHER; note = 2'-deoxy-2'-fluoroadenosine-3'-phosphate
  modified_base 10: mod_base = OTHER; note = 2'-O-methylguanosine-3'-phosphate
  modified_base 11: mod_base = OTHER; note = 2'-O-methylguanosine-3'-phosphate
  modified_base 12: mod_base = OTHER; note = 2'-O-methyladenosine-3'-phosphate
  modified_base 13: mod_base = OTHER; note = 2'-O-methyladenosine-3'-phosphate
  modified_base 14: mod_base = OTHER; note = 2'-deoxy-2'-fluorouridine-3'-phosphate
  modified_base 15: mod_base = OTHER; note = 2'-O-methyluridine-3'-phosphate
  modified_base 16: mod_base = OTHER; note = 2'-deoxy-2'-fluorouridine-3'-phosphate
  modified_base 17: mod_base = OTHER; note = 2'-O-methyluridine-3'-phosphate
  modified_base 18: mod_base = OTHER; note = 2'-O-methylcytidine-3'-phosphate
  modified_base 19: mod_base = OTHER; note = 2'-O-methyladenosine-3'-phosphate
  modified_base 20: mod_base = OTHER; note = 2'-O-methyluridine-3'-phosphate
  modified_base 21: mod_base = OTHER; note = 2'-O-methyladenosine-3'-phosphorothioate
  modified_base 22: mod_base = OTHER; note = 2'-O-methylcytidine-3'-phosphorothioate
  modified_base 23: mod_base = OTHER; note = 2'-O-methyladenosine
agtccagtaggaattttcataca

SEQ ID NO: 5914 - RNA, 23 nt, synthetic construct
  source 1..23: mol_type = other RNA
  modified_base 1: mod_base = OTHER; note = 2'-O-methyladenosine-3'-phosphorothioate
  modified_base 2: mod_base = OTHER; note = 2'-deoxy-2'-fluoroguanosine-3'-phosphorothioate
  modified_base 3: mod_base = OTHER; note = 2'-O-methyluridine-3'-phosphate
  modified_base 4: mod_base = OTHER; note = 2'-O-methylguanosine-3'-phosphate
  modified_base 5: mod_base = OTHER; note = 2'-O-methyluridine-3'-phosphate
  modified_base 6: mod_base = OTHER; note = 2'-deoxy-2'-fluorouridine-3'-phosphate
  modified_base 7: mod_base = OTHER; note = 2'-O-methylguanosine-3'-phosphate
  modified_base 8: mod_base = OTHER; note = 2'-deoxy-2'-fluoroadenosine-3'-phosphate
  modified_base 9: mod_base = OTHER; note = 2'-deoxy-2'-fluorouridine-3'-phosphate
  modified_base 10: mod_base = OTHER; note = 2'-O-methyladenosine-3'-phosphate
  modified_base 11: mod_base = OTHER; note = 2'-O-methyladenosine-3'-phosphate
  modified_base 12: mod_base = OTHER; note = 2'-O-methyluridine-3'-phosphate
  modified_base 13: mod_base = OTHER; note = 2'-O-methyluridine-3'-phosphate
  modified_base 14: mod_base = OTHER; note = 2'-deoxy-2'-fluorouridine-3'-phosphate
  modified_base 15: mod_base = OTHER; note = 2'-O-methyluridine-3'-phosphate
  modified_base 16: mod_base = OTHER; note = 2'-deoxy-2'-fluoroguanosine-3'-phosphate
  modified_base 17: mod_base = OTHER; note = 2'-O-methylguanosine-3'-phosphate
  modified_base 18: mod_base = OTHER; note = 2'-O-methylcytidine-3'-phosphate
  modified_base 19: mod_base = OTHER; note = 2'-O-methyladenosine-3'-phosphate
  modified_base 20: mod_base = OTHER; note = 2'-O-methylguanosine-3'-phosphate
  modified_base 21: mod_base = OTHER; note = 2'-O-methylcytidine-3'-phosphorothioate
  modified_base 22: mod_base = OTHER; note = 2'-O-methyladenosine-3'-phosphorothioate
  modified_base 23: mod_base = OTHER; note = 2'-O-methyluridine
agtgttgataattttggcagcat

SEQ ID NO: 5915 - RNA, 23 nt, synthetic construct
  source 1..23: mol_type = other RNA
  modified_base 1: mod_base = OTHER; note = 2'-O-methyladenosine-3'-phosphorothioate
  modified_base 2: mod_base = OTHER; note = 2'-deoxy-2'-fluorouridine-3'-phosphorothioate
  modified_base 3: mod_base = OTHER; note = 2'-O-methyluridine-3'-phosphate
  modified_base 4: mod_base = OTHER; note = 2'-O-methyluridine-3'-phosphate
  modified_base 5: mod_base = OTHER; note = 2'-O-methylcytidine-3'-phosphate
  modified_base 6: mod_base = OTHER; note = 2'-deoxy-2'-fluorouridine-3'-phosphate
  modified_base 7: mod_base = OTHER; note = 2'-O-methylguanosine-3'-phosphate
  modified_base 8: mod_base = OTHER; note = 2'-deoxy-2'-fluoroadenosine-3'-phosphate
  modified_base 9: mod_base = OTHER; note = 2'-deoxy-2'-fluorouridine-3'-phosphate
  modified_base 10: mod_base = OTHER; note = 2'-O-methylguanosine-3'-phosphate
  modified_base 11: mod_base = OTHER; note = 2'-O-methyladenosine-3'-phosphate
  modified_base 12: mod_base = OTHER; note = 2'-O-methyluridine-3'-phosphate
  modified_base 13: mod_base = OTHER; note = 2'-O-methylcytidine-3'-phosphate
  modified_base 14: mod_base = OTHER; note = 2'-deoxy-2'-fluorocytidine-3'-phosphate
  modified_base 15: mod_base = OTHER; note = 2'-O-methylcytidine-3'-phosphate
  modified_base 16: mod_base = OTHER; note = 2'-deoxy-2'-fluorouridine-3'-phosphate
  modified_base 17: mod_base = OTHER; note = 2'-O-methyladenosine-3'-phosphate
  modified_base 18: mod_base = OTHER; note = 2'-O-methylguanosine-3'-phosphate
  modified_base 19: mod_base = OTHER; note = 2'-O-methylcytidine-3'-phosphate
  modified_base 20: mod_base = OTHER; note = 2'-O-methyladenosine-3'-phosphate
  modified_base 21: mod_base = OTHER; note = 2'-O-methylguanosine-3'-phosphorothioate
  modified_base 22: mod_base = OTHER; note = 2'-O-methyladenosine-3'-phosphorothioate
  modified_base 23: mod_base = OTHER; note = 2'-O-methyladenosine
atttctgatgatccctagcagaa

SEQ ID NO: 5916 - RNA, 23 nt, synthetic construct
  source 1..23: mol_type = other RNA
  modified_base 1: mod_base = OTHER; note = 2'-O-methyladenosine-3'-phosphorothioate
  modified_base 2: mod_base = OTHER; note = 2'-deoxy-2'-fluoroguanosine-3'-phosphorothioate
  modified_base 3: mod_base = OTHER; note = 2'-O-methylcytidine-3'-phosphate
  modified_base 4: mod_base = OTHER; note = 2'-O-methyluridine-3'-phosphate
  modified_base 5: mod_base = OTHER; note = 2'-O-methyluridine-3'-phosphate
  modified_base 6: mod_base = OTHER; note = 2'-deoxy-2'-fluorocytidine-3'-phosphate
  modified_base 7: mod_base = OTHER; note = 2'-O-methyladenosine-3'-phosphate
  modified_base 8: mod_base = OTHER; note = 2'-deoxy-2'-fluoroadenosine-3'-phosphate
  modified_base 9: mod_base = OTHER; note = 2'-deoxy-2'-fluoroadenosine-3'-phosphate
  modified_base 10: mod_base = OTHER; note = 2'-O-methyladenosine-3'-phosphate
  modified_base 11: mod_base = OTHER; note = 2'-O-methylguanosine-3'-phosphate
  modified_base 12: mod_base = OTHER; note = 2'-O-methyladenosine-3'-phosphate
  modified_base 13: mod_base = OTHER; note = 2'-O-methylcytidine-3'-phosphate
  modified_base 14: mod_base = OTHER; note = 2'-deoxy-2'-fluoroguanosine-3'-phosphate
  modified_base 15: mod_base = OTHER; note = 2'-O-methylguanosine-3'-phosphate
  modified_base 16: mod_base = OTHER; note = 2'-deoxy-2'-fluorocytidine-3'-phosphate
  modified_base 17: mod_base = OTHER; note = 2'-O-methyladenosine-3'-phosphate
  modified_base 18: mod_base = OTHER; note = 2'-O-methylguanosine-3'-phosphate
  modified_base 19: mod_base = OTHER; note = 2'-O-methyladenosine-3'-phosphate
  modified_base 20: mod_base = OTHER; note = 2'-O-methyluridine-3'-phosphate
  modified_base 21: mod_base = OTHER; note = 2'-O-methyluridine-3'-phosphorothioate
  modified_base 22: mod_base = OTHER; note = 2'-O-methylcytidine-3'-phosphorothioate
  modified_base 23: mod_base = OTHER; note = 2'-O-methyluridine
agcttcaaaagacggcagattct

SEQ ID NO: 5917 - RNA, 23 nt, synthetic construct
  source 1..23: mol_type = other RNA
  modified_base 1: mod_base = OTHER; note = 2'-O-methyladenosine-3'-phosphorothioate
  modified_base 2: mod_base = OTHER; note = 2'-deoxy-2'-fluorouridine-3'-phosphorothioate
  modified_base 3: mod_base = OTHER; note = 2'-O-methylguanosine-3'-phosphate
  modified_base 4: mod_base = OTHER; note = 2'-O-methyladenosine-3'-phosphate
  modified_base 5: mod_base = OTHER; note = 2'-O-methyladenosine-3'-phosphate
  modified_base 6: mod_base = OTHER; note = 2'-deoxy-2'-fluoroguanosine-3'-phosphate
  modified_base 7: mod_base = OTHER; note = 2'-O-methyluridine-3'-phosphate
  modified_base 8: mod_base = OTHER; note = 2'-deoxy-2'-fluorocytidine-3'-phosphate
  modified_base 9: mod_base = OTHER; note = 2'-deoxy-2'-fluoroguanosine-3'-phosphate
  modified_base 10: mod_base = OTHER; note = 2'-O-methylcytidine-3'-phosphate
  modified_base 11: mod_base = OTHER; note = 2'-O-methyladenosine-3'-phosphate
  modified_base 12: mod_base = OTHER; note = 2'-O-methylcytidine-3'-phosphate
  modified_base 13: mod_base = OTHER; note = 2'-O-methyladenosine-3'-phosphate
  modified_base 14: mod_base = OTHER; note = 2'-deoxy-2'-fluoroadenosine-3'-phosphate
  modified_base 15: mod_base = OTHER; note = 2'-O-methyluridine-3'-phosphate
  modified_base 16: mod_base = OTHER; note = 2'-deoxy-2'-fluoroadenosine-3'-phosphate
  modified_base 17: mod_base = OTHER; note = 2'-O-methyluridine-3'-phosphate
  modified_base 18: mod_base = OTHER; note = 2'-O-methyluridine-3'-phosphate
  modified_base 19: mod_base = OTHER; note = 2'-O-methyladenosine-3'-phosphate
  modified_base 20: mod_base = OTHER; note = 2'-O-methylguanosine-3'-phosphate
  modified_base 21: mod_base = OTHER; note = 2'-O-methylguanosine-3'-phosphorothioate
  modified_base 22: mod_base = OTHER; note = 2'-O-methylguanosine-3'-phosphorothioate
  modified_base 23: mod_base = OTHER; note = 2'-O-methyluridine
atgaagtcgcacaatattagggt

SEQ ID NO: 5918 - RNA, 23 nt, synthetic construct
  source 1..23: mol_type = other RNA
  modified_base 1: mod_base = OTHER; note = 2'-O-methyladenosine-3'-phosphorothioate
  modified_base 2: mod_base = OTHER; note = 2'-deoxy-2'-fluoroguanosine-3'-phosphorothioate
  modified_base 3: mod_base = OTHER; note = 2'-O-methyluridine-3'-phosphate
  modified_base 4: mod_base = OTHER; note = 2'-O-methyladenosine-3'-phosphate
  modified_base 5: mod_base = OTHER; note = 2'-O-methyladenosine-3'-phosphate
  modified_base 6: mod_base = OTHER; note = 2'-deoxy-2'-fluorocytidine-3'-phosphate
  modified_base 7: mod_base = OTHER; note = 2'-O-methyluridine-3'-phosphate
  modified_base 8: mod_base = OTHER; note = 2'-deoxy-2'-fluoroadenosine-3'-phosphate
  modified_base 9: mod_base = OTHER; note = 2'-deoxy-2'-fluoroadenosine-3'-phosphate
  modified_base 10: mod_base = OTHER; note = 2'-O-methyladenosine-3'-phosphate
  modified_base 11: mod_base = OTHER; note = 2'-O-methyluridine-3'-phosphate
  modified_base 12: mod_base = OTHER; note = 2'-O-methylcytidine-3'-phosphate
  modified_base 13: mod_base = OTHER; note = 2'-O-methyladenosine-3'-phosphate
  modified_base 14: mod_base = OTHER; note = 2'-deoxy-2'-fluoroadenosine-3'-phosphate
  modified_base 15: mod_base = OTHER; note = 2'-O-methyladenosine-3'-phosphate
  modified_base 16: mod_base = OTHER; note = 2'-deoxy-2'-fluorocytidine-3'-phosphate
  modified_base 17: mod_base = OTHER; note = 2'-O-methyladenosine-3'-phosphate
  modified_base 18: mod_base = OTHER; note = 2'-O-methylcytidine-3'-phosphate
  modified_base 19: mod_base = OTHER; note = 2'-O-methylcytidine-3'-phosphate
  modified_base 20: mod_base = OTHER; note = 2'-O-methyladenosine-3'-phosphate
  modified_base 21: mod_base = OTHER; note = 2'-O-methyladenosine-3'-phosphorothioate
  modified_base 22: mod_base = OTHER; note = 2'-O-methylguanosine-3'-phosphorothioate
  modified_base 23: mod_base = OTHER; note = 2'-O-methyluridine
agtaactaaatcaaacaccaagt

SEQ ID NO: 5919 - RNA, 23 nt, synthetic construct
  source 1..23: mol_type = other RNA
  modified_base 1: mod_base = OTHER; note = 2'-O-methyladenosine-3'-phosphorothioate
  modified_base 2: mod_base = OTHER; note = 2'-deoxy-2'-fluorocytidine-3'-phosphorothioate
  modified_base 3: mod_base = OTHER; note = 2'-O-methyluridine-3'-phosphate
  modified_base 4: mod_base = OTHER; note = 2'-O-methylguanosine-3'-phosphate
  modified_base 5: mod_base = OTHER; note = 2'-O-methylguanosine-3'-phosphate
  modified_base 6: mod_base = OTHER; note = 2'-deoxy-2'-fluorocytidine-3'-phosphate
  modified_base 7: mod_base = OTHER; note = 2'-O-methyladenosine-3'-phosphate
  modified_base 8: mod_base = OTHER; note = 2'-deoxy-2'-fluorouridine-3'-phosphate
  modified_base 9: mod_base = OTHER; note = 2'-deoxy-2'-fluorocytidine-3'-phosphate
  modified_base 10: mod_base = OTHER; note = 2'-O-methyladenosine-3'-phosphate
  modified_base 11: mod_base = OTHER; note = 2'-O-methylguanosine-3'-phosphate
  modified_base 12: mod_base = OTHER; note = 2'-O-methylcytidine-3'-phosphate
  modified_base 13: mod_base = OTHER; note = 2'-O-methyluridine-3'-phosphate
  modified_base 14: mod_base = OTHER; note = 2'-deoxy-2'-fluorouridine-3'-phosphate
  modified_base 15: mod_base = OTHER; note = 2'-O-methylcytidine-3'-phosphate
  modified_base 16: mod_base = OTHER; note = 2'-deoxy-2'-fluoroadenosine-3'-phosphate
  modified_base 17: mod_base = OTHER; note = 2'-O-methylcytidine-3'-phosphate
  modified_base 18: mod_base = OTHER; note = 2'-O-methyluridine-3'-phosphate
  modified_base 19: mod_base = OTHER; note = 2'-O-methylguanosine-3'-phosphate
  modified_base 20: mod_base = OTHER; note = 2'-O-methyluridine-3'-phosphate
  modified_base 21: mod_base = OTHER; note = 2'-O-methyladenosine-3'-phosphorothioate
  modified_base 22: mod_base = OTHER; note = 2'-O-methylguanosine-3'-phosphorothioate
  modified_base 23: mod_base = OTHER; note = 2'-O-methyluridine
actggcatcagcttcactgtagt

SEQ ID NO: 5920 - RNA, 23 nt, synthetic construct
  source 1..23: mol_type = other RNA
  modified_base 1: mod_base = OTHER; note = 2'-O-methyladenosine-3'-phosphorothioate
  modified_base 2: mod_base = OTHER; note = 2'-deoxy-2'-fluorocytidine-3'-phosphorothioate
  modified_base 3: mod_base = OTHER; note = 2'-O-methyluridine-3'-phosphate
  modified_base 4: mod_base = OTHER; note = 2'-O-methylguanosine-3'-phosphate
  modified_base 5: mod_base = OTHER; note = 2'-O-methylcytidine-3'-phosphate
  modified_base 6: mod_base = OTHER; note = 2'-deoxy-2'-fluorouridine-3'-phosphate
  modified_base 7: mod_base = OTHER; note = 2'-O-methylguanosine-3'-phosphate
  modified_base 8: mod_base = OTHER; note = 2'-deoxy-2'-fluoroadenosine-3'-phosphate
  modified_base 9: mod_base = OTHER; note = 2'-deoxy-2'-fluoroadenosine-3'-phosphate
  modified_base 10: mod_base = OTHER; note = 2'-O-methyluridine-3'-phosphate
  modified_base 11: mod_base = OTHER; note = 2'-O-methylguanosine-3'-phosphate
  modified_base 12: mod_base = OTHER; note = 2'-O-methylcytidine-3'-phosphate
  modified_base 13: mod_base = OTHER; note = 2'-O-methyladenosine-3'-phosphate
  modified_base 14: mod_base = OTHER; note = 2'-deoxy-2'-fluoroadenosine-3'-phosphate
  modified_base 15: mod_base = OTHER; note = 2'-O-methyluridine-3'-phosphate
  modified_base 16: mod_base = OTHER; note = 2'-deoxy-2'-fluoroguanosine-3'-phosphate
  modified_base 17: mod_base = OTHER; note = 2'-O-methyladenosine-3'-phosphate
  modified_base 18: mod_base = OTHER; note = 2'-O-methylcytidine-3'-phosphate
  modified_base 19: mod_base = OTHER; note = 2'-O-methyluridine-3'-phosphate
  modified_base 20: mod_base = OTHER; note = 2'-O-methylguanosine-3'-phosphate
  modified_base 21: mod_base = OTHER; note = 2'-O-methylguanosine-3'-phosphorothioate
  modified_base 22: mod_base = OTHER; note = 2'-O-methylcytidine-3'-phosphorothioate
  modified_base 23: mod_base = OTHER; note = 2'-O-methyladenosine
actgctgaatgcaatgactggca

SEQ ID NO: 5921 - RNA, 23 nt, synthetic construct
  source 1..23: mol_type = other RNA
  modified_base 1: mod_base = OTHER; note = 2'-O-methyladenosine-3'-phosphorothioate
  modified_base 2: mod_base = OTHER; note = 2'-deoxy-2'-fluorocytidine-3'-phosphorothioate
  modified_base 3: mod_base = OTHER; note = 2'-O-methyluridine-3'-phosphate
  modified_base 4: mod_base = OTHER; note = 2'-O-methyladenosine-3'-phosphate
  modified_base 5: mod_base = OTHER; note = 2'-O-methyladenosine-3'-phosphate
  modified_base 6: mod_base = OTHER; note = 2'-deoxy-2'-fluoroadenosine-3'-phosphate
  modified_base 7: mod_base = OTHER; note = 2'-O-methyladenosine-3'-phosphate
  modified_base 8: mod_base = OTHER; note = 2'-deoxy-2'-fluoroguanosine-3'-phosphate
  modified_base 9: mod_base = OTHER; note = 2'-deoxy-2'-fluorocytidine-3'-phosphate
  modified_base 10: mod_base = OTHER; note = 2'-O-methyladenosine-3'-phosphate
  modified_base 11: mod_base = OTHER; note = 2'-O-methyladenosine-3'-phosphate
  modified_base 12: mod_base = OTHER; note = 2'-O-methyladenosine-3'-phosphate
  modified_base 13: mod_base = OTHER; note = 2'-O-methyluridine-3'-phosphate
  modified_base 14: mod_base = OTHER; note = 2'-deoxy-2'-fluorouridine-3'-phosphate
  modified_base 15: mod_base = OTHER; note = 2'-O-methylcytidine-3'-phosphate
  modified_base 16: mod_base = OTHER; note = 2'-deoxy-2'-fluorouridine-3'-phosphate
  modified_base 17: mod_base = OTHER; note = 2'-O-methylcytidine-3'-phosphate
  modified_base 18: mod_base = OTHER; note = 2'-O-methyladenosine-3'-phosphate
  modified_base 19: mod_base = OTHER; note = 2'-O-methylguanosine-3'-phosphate
  modified_base 20: mod_base = OTHER; note = 2'-O-methylguanosine-3'-phosphate
  modified_base 21: mod_base = OTHER; note = 2'-O-methylcytidine-3'-phosphorothioate
  modified_base 22: mod_base = OTHER; note = 2'-O-methyluridine-3'-phosphorothioate
  modified_base 23: mod_base = OTHER; note = 2'-O-methyluridine
actaaaagcaaattctcaggctt

SEQ ID NO: 5922 - RNA, 23 nt, synthetic construct
  source 1..23: mol_type = other RNA
  modified_base 1: mod_base = OTHER; note = 2'-O-methyladenosine-3'-phosphorothioate
  modified_base 2: mod_base = OTHER; note = 2'-deoxy-2'-fluoroadenosine-3'-phosphorothioate
  modified_base 3: mod_base = OTHER; note = 2'-O-methyladenosine-3'-phosphate
  modified_base 4: mod_base = OTHER; note = 2'-O-methylguanosine-3'-phosphate
  modified_base 5: mod_base = OTHER; note = 2'-O-methyluridine-3'-phosphate
  modified_base 6: mod_base = OTHER; note = 2'-deoxy-2'-fluorocytidine-3'-phosphate
  modified_base 7: mod_base = OTHER; note = 2'-O-methyluridine-3'-phosphate
  modified_base 8: mod_base = OTHER; note = 2'-deoxy-2'-fluoroguanosine-3'-phosphate
  modified_base 9: mod_base = OTHER; note = 2'-deoxy-2'-fluorocytidine-3'-phosphate
  modified_base 10: mod_base = OTHER; note = 2'-O-methylcytidine-3'-phosphate
  modified_base 11: mod_base = OTHER; note = 2'-O-methyladenosine-3'-phosphate
  modified_base 12: mod_base = OTHER; note = 2'-O-methyladenosine-3'-phosphate
  modified_base 13: mod_base = OTHER; note = 2'-O-methyluridine-3'-phosphate
  modified_base 14: mod_base = OTHER; note = 2'-deoxy-2'-fluorouridine-3'-phosphate
  modified_base 15: mod_base = OTHER; note = 2'-O-methyluridine-3'-phosphate
  modified_base 16: mod_base = OTHER; note = 2'-deoxy-2'-fluorocytidine-3'-phosphate
  modified_base 17: mod_base = OTHER; note = 2'-O-methyladenosine-3'-phosphate
  modified_base 18: mod_base = OTHER; note = 2'-O-methylcytidine-3'-phosphate
  modified_base 19: mod_base = OTHER; note = 2'-O-methyladenosine-3'-phosphate
  modified_base 20: mod_base = OTHER; note = 2'-O-methylguanosine-3'-phosphate
  modified_base 21: mod_base = OTHER; note = 2'-O-methylcytidine-3'-phosphorothioate
  modified_base 22: mod_base = OTHER; note = 2'-O-methyluridine-3'-phosphorothioate
  modified_base 23: mod_base = OTHER; note = 2'-O-methylguanosine
aaagtctgccaatttcacagctg

SEQ ID NO: 5923 - RNA, 23 nt, synthetic construct
  source 1..23: mol_type = other RNA
  modified_base 1: mod_base = OTHER; note = 2'-O-methyladenosine-3'-phosphorothioate
  modified_base 2: mod_base = OTHER; note = 2'-deoxy-2'-fluoroguanosine-3'-phosphorothioate
  modified_base 3: mod_base = OTHER; note = 2'-O-methyluridine-3'-phosphate
  modified_base 4: mod_base = OTHER; note = 2'-O-methyladenosine-3'-phosphate
  modified_base 5: mod_base = OTHER; note = 2'-O-methyladenosine-3'-phosphate
  modified_base 6: mod_base = OTHER; note = 2'-deoxy-2'-fluoroadenosine-3'-phosphate
  modified_base 7: mod_base = OTHER; note = 2'-O-methyladenosine-3'-phosphate
  modified_base 8: mod_base = OTHER; note = 2'-deoxy-2'-fluorocytidine-3'-phosphate
  modified_base 9: mod_base = OTHER; note = 2'-deoxy-2'-fluorouridine-3'-phosphate
  modified_base 10: mod_base = OTHER; note = 2'-O-methyluridine-3'-phosphate
  modified_base 11: mod_base = OTHER; note = 2'-O-methylcytidine-3'-phosphate
  modified_base 12: mod_base = OTHER; note = 2'-O-methyluridine-3'-phosphate
  modified_base 13: mod_base = OTHER; note = 2'-O-methylguanosine-3'-phosphate
  modified_base 14: mod_base = OTHER; note = 2'-deoxy-2'-fluoroguanosine-3'-phosphate
  modified_base 15: mod_base = OTHER; note = 2'-O-methyladenosine-3'-phosphate
  modified_base 16: mod_base = OTHER; note = 2'-deoxy-2'-fluoroguanosine-3'-phosphate
  modified_base 17: mod_base = OTHER; note = 2'-O-methyladenosine-3'-phosphate
  modified_base 18: mod_base = OTHER; note = 2'-O-methyladenosine-3'-phosphate
  modified_base 19: mod_base = OTHER; note = 2'-O-methyladenosine-3'-phosphate
  modified_base 20: mod_base = OTHER; note = 2'-O-methylguanosine-3'-phosphate
  modified_base 21: mod_base = OTHER; note = 2'-O-methyladenosine-3'-phosphorothioate
  modified_base 22: mod_base = OTHER; note = 2'-O-methyluridine-3'-phosphorothioate
  modified_base 23: mod_base = OTHER; note = 2'-O-methyladenosine
agtaaaacttctggagaaagata

SEQ ID NO: 5924 - RNA, 23 nt, synthetic construct
  source 1..23: mol_type = other RNA
  modified_base 1: mod_base = OTHER; note = 2'-O-methyladenosine-3'-phosphorothioate
  modified_base 2: mod_base = OTHER; note = 2'-deoxy-2'-fluorocytidine-3'-phosphorothioate
  modified_base 3: mod_base = OTHER; note = 2'-O-methylcytidine-3'-phosphate
  modified_base 4: mod_base = OTHER; note = 2'-O-methyladenosine-3'-phosphate
  modified_base 5: mod_base = OTHER; note = 2'-O-methyluridine-3'-phosphate
  modified_base 6: mod_base = OTHER; note = 2'-deoxy-2'-fluoroadenosine-3'-phosphate
  modified_base 7: mod_base = OTHER; note = 2'-O-methyladenosine-3'-phosphate
  modified_base 8: mod_base = OTHER; note = 2'-deoxy-2'-fluoroguanosine-3'-phosphate
  modified_base 9: mod_base = OTHER; note = 2'-deoxy-2'-fluoroguanosine-3'-phosphate
  modified_base 10: mod_base = OTHER; note = 2'-O-methyladenosine-3'-phosphate
  modified_base 11: mod_base = OTHER; note = 2'-O-methyluridine-3'-phosphate
  modified_base 12: mod_base = OTHER; note = 2'-O-methylcytidine-3'-phosphate
  modified_base 13: mod_base = OTHER; note = 2'-O-methyluridine-3'-phosphate
  modified_base 14: mod_base = OTHER; note = 2'-deoxy-2'-fluorouridine-3'-phosphate
  modified_base 15: mod_base = OTHER; note = 2'-O-methyluridine-3'-phosphate
  modified_base 16: mod_base = OTHER; note = 2'-deoxy-2'-fluoroadenosine-3'-phosphate
  modified_base 17: mod_base = OTHER; note = 2'-O-methylcytidine-3'-phosphate
  modified_base 18: mod_base = OTHER; note = 2'-O-methylguanosine-3'-phosphate
  modified_base 19: mod_base = OTHER; note = 2'-O-methyluridine-3'-phosphate
  modified_base 20: mod_base = OTHER; note = 2'-O-methyladenosine-3'-phosphate
  modified_base 21: mod_base = OTHER; note = 2'-O-methyladenosine-3'-phosphorothioate
  modified_base 22: mod_base = OTHER; note = 2'-O-methyladenosine-3'-phosphorothioate
  modified_base 23: mod_base = OTHER; note = 2'-O-methyladenosine
accataaggatctttacgtaaaa

SEQ ID NO: 5925 - RNA, 23 nt, synthetic construct
  source 1..23: mol_type = other RNA
  modified_base 1: mod_base = OTHER; note = 2'-O-methyladenosine-3'-phosphorothioate
  modified_base 2: mod_base = OTHER; note = 2'-deoxy-2'-fluoroadenosine-3'-phosphorothioate
  modified_base 3: mod_base = OTHER; note = 2'-O-methylcytidine-3'-phosphate
  modified_base 4: mod_base = OTHER; note = 2'-O-methyladenosine-3'-phosphate
  modified_base 5: mod_base = OTHER; note = 2'-O-methyladenosine-3'-phosphate
  modified_base 6: mod_base = OTHER; note = 2'-deoxy-2'-fluoroguanosine-3'-phosphate
  modified_base 7: mod_base = OTHER; note = 2'-O-methyluridine-3'-phosphate
  modified_base 8: mod_base = OTHER; note = 2'-deoxy-2'-fluoroadenosine-3'-phosphate
  modified_base 9: mod_base = OTHER; note = 2'-deoxy-2'-fluoroguanosine-3'-phosphate
  modified_base 10: mod_base = OTHER; note = 2'-O-methyladenosine-3'-phosphate
  modified_base 11: mod_base = OTHER; note = 2'-O-methyladenosine-3'-phosphate
  modified_base 12: mod_base = OTHER; note = 2'-O-methyluridine-3'-phosphate
  modified_base 13: mod_base = OTHER; note = 2'-O-methyladenosine-3'-phosphate
  modified_base 14: mod_base = OTHER; note = 2'-deoxy-2'-fluorouridine-3'-phosphate
  modified_base 15: mod_base = OTHER; note = 2'-O-methyladenosine-3'-phosphate
  modified_base 16: mod_base = OTHER; note = 2'-deoxy-2'-fluoroguanosine-3'-phosphate
  modified_base 17: mod_base = OTHER; note = 2'-O-methyladenosine-3'-phosphate
  modified_base 18: mod_base = OTHER; note = 2'-O-methylguanosine-3'-phosphate
  modified_base 19: mod_base = OTHER; note = 2'-O-methyladenosine-3'-phosphate
  modified_base 20: mod_base = OTHER; note = 2'-O-methyladenosine-3'-phosphate
  modified_base 21: mod_base = OTHER; note = 2'-O-methyluridine-3'-phosphorothioate
  modified_base 22: mod_base = OTHER; note = 2'-O-methylguanosine-3'-phosphorothioate
  modified_base 23: mod_base = OTHER; note = 2'-O-methyladenosine
aacaagtagaatatagagaatga

SEQ ID NO: 5926 - RNA, 23 nt, synthetic construct
  source 1..23: mol_type = other RNA
  modified_base 1: mod_base = OTHER; note = 2'-O-methyladenosine-3'-phosphorothioate
  modified_base 2: mod_base = OTHER; note = 2'-deoxy-2'-fluoroguanosine-3'-phosphorothioate
  modified_base 3: mod_base = OTHER; note = 2'-O-methylcytidine-3'-phosphate
  modified_base 4: mod_base = OTHER; note = 2'-O-methyluridine-3'-phosphate
  modified_base 5: mod_base = OTHER; note = 2'-O-methylguanosine-3'-phosphate
  modified_base 6: mod_base = OTHER; note = 2'-deoxy-2'-fluoroadenosine-3'-phosphate
  modified_base 7: mod_base = OTHER; note = 2'-O-methyluridine-3'-phosphate
  modified_base 8: mod_base = OTHER; note = 2'-deoxy-2'-fluoroadenosine-3'-phosphate
  modified_base 9: mod_base = OTHER; note = 2'-deoxy-2'-fluoroguanosine-3'-phosphate
  modified_base 10: mod_base = OTHER; note = 2'-O-methyladenosine-3'-phosphate
  modified_base 11: mod_base = OTHER; note = 2'-O-methylguanosine-3'-phosphate
  modified_base 12: mod_base = OTHER; note = 2'-O-methyluridine-3'-phosphate
  modified_base 13: mod_base = OTHER; note = 2'-O-methylcytidine-3'-phosphate
  modified_base 14: mod_base = OTHER; note = 2'-deoxy-2'-fluorouridine-3'-phosphate
  modified_base 15: mod_base = OTHER; note = 2'-O-methylguanosine-3'-phosphate
  modified_base 16: mod_base = OTHER; note = 2'-deoxy-2'-fluorouridine-3'-phosphate
  modified_base 17: mod_base = OTHER; note = 2'-O-methylguanosine-3'-phosphate
  modified_base 18: mod_base = OTHER; note = 2'-O-methyluridine-3'-phosphate
  modified_base 19: mod_base = OTHER; note = 2'-O-methyluridine-3'-phosphate
  modified_base 20: mod_base = OTHER; note = 2'-O-methylguanosine-3'-phosphate
  modified_base 21: mod_base = OTHER; note = 2'-O-methylguanosine-3'-phosphorothioate
  modified_base 22: mod_base = OTHER; note = 2'-O-methyluridine-3'-phosphorothioate
  modified_base 23: mod_base = OTHER; note = 2'-O-methylcytidine
agctgatagagtctgtgttggtc

SEQ ID NO: 5927 - RNA, 23 nt, synthetic construct
  source 1..23: mol_type = other RNA
  modified_base 1: mod_base = OTHER; note = 2'-O-methyladenosine-3'-phosphorothioate
  modified_base 2: mod_base = OTHER; note = 2'-deoxy-2'-fluoroguanosine-3'-phosphorothioate
  modified_base 3: mod_base = OTHER; note = 2'-O-methyladenosine-3'-phosphate
  modified_base 4: mod_base = OTHER; note = 2'-O-methyluridine-3'-phosphate
  modified_base 5: mod_base = OTHER; note = 2'-O-methylguanosine-3'-phosphate
  modified_base 6: mod_base = OTHER; note = 2'-deoxy-2'-fluoroguanosine-3'-phosphate
  modified_base 7: mod_base = OTHER; note = 2'-O-methyladenosine-3'-phosphate
  modified_base 8: mod_base = OTHER; note = 2'-deoxy-2'-fluoroadenosine-3'-phosphate
  modified_base 9: mod_base = OTHER; note = 2'-deoxy-2'-fluoroadenosine-3'-phosphate
  modified_base 10: mod_base = OTHER; note = 2'-O-methyladenosine-3'-phosphate
  modified_base 11: mod_base = OTHER; note = 2'-O-methyluridine-3'-phosphate
  modified_base 12: mod_base = OTHER; note = 2'-O-methylcytidine-3'-phosphate
  modified_base 13: mod_base = OTHER; note = 2'-O-methyladenosine-3'-phosphate
  modified_base 14: mod_base = OTHER; note = 2'-deoxy-2'-fluorouridine-3'-phosphate
  modified_base 15: mod_base = OTHER; note = 2'-O-methyladenosine-3'-phosphate
  modified_base 16: mod_base = OTHER; note = 2'-deoxy-2'-fluoroadenosine-3'-phosphate
  modified_base 17: mod_base = OTHER; note = 2'-O-methylguanosine-3'-phosphate
  modified_base 18: mod_base = OTHER; note = 2'-O-methylcytidine-3'-phosphate
  modified_base 19: mod_base = OTHER; note = 2'-O-methyluridine-3'-phosphate
  modified_base 20: mod_base = OTHER; note = 2'-O-methylcytidine-3'-phosphate
  modified_base 21: mod_base = OTHER; note = 2'-O-methylcytidine-3'-phosphorothioate
  modified_base 22: mod_base = OTHER; note = 2'-O-methyladenosine-3'-phosphorothioate
  modified_base 23: mod_base = OTHER; note = 2'-O-methylguanosine
agatggaaaatcataagctccag

SEQ ID NO: 5928 - RNA, 23 nt, synthetic construct
  source 1..23: mol_type = other RNA
  modified_base 1: mod_base = OTHER; note = 2'-O-methyladenosine-3'-phosphorothioate
  modified_base 2: mod_base = OTHER; note = 2'-deoxy-2'-fluorouridine-3'-phosphorothioate
  modified_base 3: mod_base = OTHER; note = 2'-O-methyladenosine-3'-phosphate
  modified_base 4: mod_base = OTHER; note = 2'-O-methyladenosine-3'-phosphate
  modified_base 5: mod_base = OTHER; note = 2'-O-methylguanosine-3'-phosphate
  modified_base 6: mod_base = OTHER; note = 2'-deoxy-2'-fluorocytidine-3'-phosphate
  modified_base 7: mod_base = OTHER; note = 2'-O-methyladenosine-3'-phosphate
  modified_base 8: mod_base = OTHER; note = 2'-deoxy-2'-fluorouridine-3'-phosphate
  modified_base 9: mod_base = OTHER; note = 2'-deoxy-2'-fluorouridine-3'-phosphate
  modified_base 10: mod_base = OTHER; note = 2'-O-methyluridine-3'-phosphate
  modified_base 11: mod_base = OTHER; note = 2'-O-methyluridine-3'-phosphate
  modified_base 12: mod_base = OTHER; note = 2'-O-methyladenosine-3'-phosphate
  modified_base 13: mod_base = OTHER; note = 2'-O-methyluridine-3'-phosphate
  modified_base 14: mod_base = OTHER; note = 2'-deoxy-2'-fluorouridine-3'-phosphate
  modified_base 15: mod_base = OTHER; note = 2'-O-methylguanosine-3'-phosphate
  modified_base 16: mod_base = OTHER; note = 2'-deoxy-2'-fluoroadenosine-3'-phosphate
  modified_base 17: mod_base = OTHER; note = 2'-O-methyluridine-3'-phosphate
  modified_base 18: mod_base = OTHER; note = 2'-O-methylguanosine-3'-phosphate
  modified_base 19: mod_base = OTHER; note = 2'-O-methyladenosine-3'-phosphate
  modified_base 20: mod_base = OTHER; note = 2'-O-methylguanosine-3'-phosphate
  modified_base 21: mod_base = OTHER; note = 2'-O-methylguanosine-3'-phosphorothioate
  modified_base 22: mod_base = OTHER; note = 2'-O-methyluridine-3'-phosphorothioate
  modified_base 23: mod_base = OTHER; note = 2'-O-methylcytidine
ataagcattttattgatgaggtc

SEQ ID NO: 5929 - RNA, 23 nt, synthetic construct
  source 1..23: mol_type = other RNA
  modified_base 1: mod_base = OTHER; note = 2'-O-methyladenosine-3'-phosphorothioate
  modified_base 2: mod_base = OTHER; note = 2'-deoxy-2'-fluorocytidine-3'-phosphorothioate
  modified_base 3: mod_base = OTHER; note = 2'-O-methylguanosine-3'-phosphate
  modified_base 4: mod_base = OTHER; note = 2'-O-methyluridine-3'-phosphate
  modified_base 5: mod_base = OTHER; note = 2'-O-methyluridine-3'-phosphate
  modified_base 6: mod_base = OTHER; note = 2'-deoxy-2'-fluoroguanosine-3'-phosphate
  modified_base 7: mod_base = OTHER; note = 2'-O-methyladenosine-3'-phosphate
  modified_base 8: mod_base = OTHER; note = 2'-deoxy-2'-fluorocytidine-3'-phosphate
  modified_base 9: mod_base = OTHER; note = 2'-deoxy-2'-fluoroadenosine-3'-phosphate
  modified_base 10: mod_base = OTHER; note = 2'-O-methylguanosine-3'-phosphate
  modified_base 11: mod_base = OTHER; note = 2'-O-methyladenosine-3'-phosphate
  modified_base 12: mod_base = OTHER; note = 2'-O-methyluridine-3'-phosphate
  modified_base 13: mod_base = OTHER; note = 2'-O-methylcytidine-3'-phosphate
  modified_base 14: mod_base = OTHER; note = 2'-deoxy-2'-fluorocytidine-3'-phosphate
  modified_base 15: mod_base = OTHER; note = 2'-O-methyladenosine-3'-phosphate
  modified_base 16: mod_base = OTHER; note = 2'-deoxy-2'-fluorouridine-3'-phosphate
  modified_base 17: mod_base = OTHER; note = 2'-O-methylguanosine-3'-phosphate
  modified_base 18: mod_base = OTHER; note = 2'-O-methylguanosine-3'-phosphate
  modified_base 19: mod_base = OTHER; note = 2'-O-methylguanosine-3'-phosphate
  modified_base 20: mod_base = OTHER; note = 2'-O-methyluridine-3'-phosphate
  modified_base 21: mod_base = OTHER; note = 2'-O-methylguanosine-3'-phosphorothioate
  modified_base 22: mod_base = OTHER; note = 2'-O-methylcytidine-3'-phosphorothioate
  modified_base 23: mod_base = OTHER; note = 2'-O-methyluridine
acgttgacagatccatgggtgct

SEQ ID NO: 5930 - RNA, 23 nt, synthetic construct
  source 1..23: mol_type = other RNA
  modified_base 1: mod_base = OTHER; note = 2'-O-methyladenosine-3'-phosphorothioate
  modified_base 2: mod_base = OTHER; note = 2'-deoxy-2'-fluoroguanosine-3'-phosphorothioate
  modified_base 3: mod_base = OTHER; note = 2'-O-methyladenosine-3'-phosphate
  modified_base 4: mod_base = OTHER; note = 2'-O-methyladenosine-3'-phosphate
  modified_base 5: mod_base = OTHER; note = 2'-O-methylguanosine-3'-phosphate
  modified_base 6: mod_base = OTHER; note = 2'-deoxy-2'-fluorocytidine-3'-phosphate
  modified_base 7: mod_base = OTHER; note = 2'-O-methyladenosine-3'-phosphate
  modified_base 8: mod_base = OTHER; note = 2'-deoxy-2'-fluoroadenosine-3'-phosphate
  modified_base 9: mod_base = OTHER; note = 2'-deoxy-2'-fluorocytidine-3'-phosphate
  modified_base 10: mod_base = OTHER; note = 2'-O-methyladenosine-3'-phosphate
  modified_base 11: mod_base = OTHER; note = 2'-O-methylguanosine-3'-phosphate
  modified_base 12: mod_base = OTHER; note = 2'-O-methyluridine-3'-phosphate
  modified_base 13: mod_base = OTHER; note = 2'-O-methyladenosine-3'-phosphate
  modified_base 14: mod_base = OTHER; note = 2'-deoxy-2'-fluoroguanosine-3'-phosphate
  modified_base 15: mod_base = OTHER; note = 2'-O-methyladenosine-3'-phosphate
  modified_base 16: mod_base = OTHER; note = 2'-deoxy-2'-fluoroadenosine-3'-phosphate
  modified_base 17: mod_base = OTHER; note = 2'-O-methylcytidine-3'-phosphate
  modified_base 18: mod_base = OTHER; note = 2'-O-methylguanosine-3'-phosphate
  modified_base 19: mod_base = OTHER; note = 2'-O-methyluridine-3'-phosphate
  modified_base 20: mod_base = OTHER; note = 2'-O-methyluridine-3'-phosphate
  modified_base 21: mod_base = OTHER; note = 2'-O-methylguanosine-3'-phosphorothioate
  modified_base 22: mod_base = OTHER; note = 2'-O-methyladenosine-3'-phosphorothioate
  modified_base 23: mod_base = OTHER; note = 2'-O-methylcytidine
agaagcaacagtagaacgttgac

SEQ ID NO: 5931 - RNA, 23 nt, synthetic construct
  source 1..23: mol_type = other RNA
  modified_base 1: mod_base = OTHER; note = 2'-O-methyladenosine-3'-phosphorothioate
  modified_base 2: mod_base = OTHER; note = 2'-deoxy-2'-fluorocytidine-3'-phosphorothioate
  modified_base 3: mod_base = OTHER; note = 2'-O-methyluridine-3'-phosphate
  modified_base 4: mod_base = OTHER; note = 2'-O-methylguanosine-3'-phosphate
  modified_base 5: mod_base = OTHER; note = 2'-O-methyluridine-3'-phosphate
  modified_base 6: mod_base = OTHER; note = 2'-deoxy-2'-fluorocytidine-3'-phosphate
  modified_base 7: mod_base = OTHER; note = 2'-O-methyluridine-3'-phosphate
  modified_base 8: mod_base = OTHER; note = 2'-deoxy-2'-fluoroguanosine-3'-phosphate
  modified_base 9: mod_base = OTHER; note = 2'-deoxy-2'-fluorouridine-3'-phosphate
  modified_base 10: mod_base = OTHER; note = 2'-O-methylguanosine-3'-phosphate
  modified_base 11: mod_base = OTHER; note = 2'-O-methylcytidine-3'-phosphate
  modified_base 12: mod_base = OTHER; note = 2'-O-methyladenosine-3'-phosphate
  modified_base 13: mod_base = OTHER; note = 2'-O-methyluridine-3'-phosphate
  modified_base 14: mod_base = OTHER; note = 2'-deoxy-2'-fluorocytidine-3'-phosphate
  modified_base 15: mod_base = OTHER; note = 2'-O-methyladenosine-3'-phosphate
  modified_base 16: mod_base = OTHER; note = 2'-deoxy-2'-fluorouridine-3'-phosphate
  modified_base 17: mod_base = OTHER; note = 2'-O-methylguanosine-3'-phosphate
  modified_base 18: mod_base = OTHER; note = 2'-O-methylguanosine-3'-phosphate
  modified_base 19: mod_base = OTHER; note = 2'-O-methyladenosine-3'-phosphate
  modified_base 20: mod_base = OTHER; note = 2'-O-methyladenosine-3'-phosphate
  modified_base 21: mod_base = OTHER; note = 2'-O-methylguanosine-3'-phosphorothioate
  modified_base 22: mod_base = OTHER; note = 2'-O-methylcytidine-3'-phosphorothioate
  modified_base 23: mod_base = OTHER; note = 2'-O-methyladenosine
actgtctgtgcatcatggaagca

SEQ ID NO: 5932 - RNA, 23 nt, synthetic construct
  source 1..23: mol_type = other RNA
  modified_base 1: mod_base = OTHER; note = 2'-O-methyladenosine-3'-phosphorothioate
  modified_base 2: mod_base = OTHER; note = 2'-deoxy-2'-fluorocytidine-3'-phosphorothioate
  modified_base 3: mod_base = OTHER; note = 2'-O-methyladenosine-3'-phosphate
  modified_base 4: mod_base = OTHER; note = 2'-O-methyluridine-3'-phosphate
  modified_base 5: mod_base = OTHER; note = 2'-O-methyluridine-3'-phosphate
  modified_base 6: mod_base = OTHER; note = 2'-deoxy-2'-fluoroadenosine-3'-phosphate
  modified_base 7: mod_base = OTHER; note = 2'-O-methyladenosine-3'-phosphate
  modified_base 8: mod_base = OTHER; note = 2'-deoxy-2'-fluoroadenosine-3'-phosphate
  modified_base 9: mod_base = OTHER; note = 2'-deoxy-2'-fluorouridine-3'-phosphate
  modified_base 10: mod_base = OTHER; note = 2'-O-methyluridine-3'-phosphate
  modified_base 11: mod_base = OTHER; note = 2'-O-methyluridine-3'-phosphate
  modified_base 12: mod_base = OTHER; note = 2'-O-methylcytidine-3'-phosphate
  modified_base 13: mod_base = OTHER; note = 2'-O-methyluridine-3'-phosphate
  modified_base 14: mod_base = OTHER; note = 2'-deoxy-2'-fluorouridine-3'-phosphate
  modified_base 15: mod_base = OTHER; note = 2'-O-methylcytidine-3'-phosphate
  modified_base 16: mod_base = OTHER; note = 2'-deoxy-2'-fluoroadenosine-3'-phosphate
  modified_base 17: mod_base = OTHER; note = 2'-O-methyladenosine-3'-phosphate
  modified_base 18: mod_base = OTHER; note = 2'-O-methylguanosine-3'-phosphate
  modified_base 19: mod_base = OTHER; note = 2'-O-methylcytidine-3'-phosphate
  modified_base 20: mod_base = OTHER; note = 2'-O-methyladenosine-3'-phosphate
  modified_base 21: mod_base = OTHER; note = 2'-O-methylguanosine-3'-phosphorothioate
  modified_base 22: mod_base = OTHER; note = 2'-O-methyluridine-3'-phosphorothioate
  modified_base 23: mod_base = OTHER; note = 2'-O-methylcytidine
acattaaatttcttcaagcagtc

SEQ ID NO: 5933 - RNA, 23 nt, synthetic construct
  source 1..23: mol_type = other RNA
  modified_base 1: mod_base = OTHER; note = 2'-O-methyladenosine-3'-phosphorothioate
  modified_base 2: mod_base = OTHER; note = 2'-deoxy-2'-fluorocytidine-3'-phosphorothioate
  modified_base 3: mod_base = OTHER; note = 2'-O-methyluridine-3'-phosphate
  modified_base 4: mod_base = OTHER; note = 2'-O-methyluridine-3'-phosphate
  modified_base 5: mod_base = OTHER; note = 2'-O-methyluridine-3'-phosphate
  modified_base 6: mod_base = OTHER; note = 2'-deoxy-2'-fluoroadenosine-3'-phosphate
  modified_base 7: mod_base = OTHER; note = 2'-O-methylguanosine-3'-phosphate
  modified_base 8: mod_base = OTHER; note = 2'-deoxy-2'-fluorouridine-3'-phosphate
  modified_base 9: mod_base = OTHER; note = 2'-deoxy-2'-fluorouridine-3'-phosphate
  modified_base 10: mod_base = OTHER; note = 2'-O-methyluridine-3'-phosphate
  modified_base 11: mod_base = OTHER; note = 2'-O-methyluridine-3'-phosphate
  modified_base 12: mod_base = OTHER; note = 2'-O-methylcytidine-3'-phosphate
  modified_base 13: mod_base = OTHER; note = 2'-O-methyluridine-3'-phosphate
  modified_base 14: mod_base = OTHER; note = 2'-deoxy-2'-fluorouridine-3'-phosphate
  modified_base 15: mod_base = OTHER; note = 2'-O-methylcytidine-3'-phosphate
  modified_base 16: mod_base = OTHER; note = 2'-deoxy-2'-fluorouridine-3'-phosphate
  modified_base 17: mod_base = OTHER; note = 2'-O-methyladenosine-3'-phosphate
  modified_base 18: mod_base = OTHER; note = 2'-O-methylguanosine-3'-phosphate
  modified_base 19: mod_base = OTHER; note = 2'-O-methylcytidine-3'-phosphate
  modified_base 20: mod_base = OTHER; note = 2'-O-methyladenosine-3'-phosphate
  modified_base 21: mod_base = OTHER; note = 2'-O-methyluridine-3'-phosphorothioate
  modified_base 22: mod_base = OTHER; note = 2'-O-methyluridine-3'-phosphorothioate
  modified_base 23: mod_base = OTHER; note = 2'-O-methyladenosine
actttagttttcttctagcatta

SEQ ID NO: 5934 - RNA, 23 nt, synthetic construct
  source 1..23: mol_type = other RNA
  modified_base 1: mod_base = OTHER; note = 2'-O-methyladenosine-3'-phosphorothioate
  modified_base 2: mod_base = OTHER; note = 2'-deoxy-2'-fluoroguanosine-3'-phosphorothioate
  modified_base 3: mod_base = OTHER; note = 2'-O-methylcytidine-3'-phosphate
  modified_base 4: mod_base = OTHER; note = 2'-O-methyladenosine-3'-phosphate
  modified_base 5: mod_base = OTHER; note = 2'-O-methyluridine-3'-phosphate
  modified_base 6: mod_base = OTHER; note = 2'-deoxy-2'-fluoroadenosine-3'-phosphate
  modified_base 7: mod_base = OTHER; note = 2'-O-methylguanosine-3'-phosphate
  modified_base 8: mod_base = OTHER; note = 2'-deoxy-2'-fluorouridine-3'-phosphate
  modified_base 9: mod_base = OTHER; note = 2'-deoxy-2'-fluorouridine-3'-phosphate
  modified_base 10: mod_base = OTHER; note = 2'-O-methylguanosine-3'-phosphate
  modified_base 11: mod_base = OTHER; note = 2'-O-methyluridine-3'-phosphate
  modified_base 12: mod_base = OTHER; note = 2'-O-methylcytidine-3'-phosphate
  modified_base 13: mod_base = OTHER; note = 2'-O-methyladenosine-3'-phosphate
  modified_base 14: mod_base = OTHER; note = 2'-deoxy-2'-fluoroadenosine-3'-phosphate
  modified_base 15: mod_base = OTHER; note = 2'-O-methylguanosine-3'-phosphate
  modified_base 16: mod_base = OTHER; note = 2'-deoxy-2'-fluoroadenosine-3'-phosphate
  modified_base 17: mod_base = OTHER; note = 2'-O-methyluridine-3'-phosphate
  modified_base 18: mod_base = OTHER; note = 2'-O-methylguanosine-3'-phosphate
  modified_base 19: mod_base = OTHER; note = 2'-O-methylguanosine-3'-phosphate
  modified_base 20: mod_base = OTHER; note = 2'-O-methylcytidine-3'-phosphate
  modified_base 21: mod_base = OTHER; note = 2'-O-methyladenosine-3'-phosphorothioate
  modified_base 22: mod_base = OTHER; note = 2'-O-methylcytidine-3'-phosphorothioate
  modified_base 23: mod_base = OTHER; note = 2'-O-methylcytidine
agcatagttgtcaagatggcacc

SEQ ID NO: 5935 - RNA, 23 nt, synthetic construct
  source 1..23: mol_type = other RNA
  modified_base 1: mod_base = OTHER; note = 2'-O-methyladenosine-3'-phosphorothioate
  modified_base 2: mod_base = OTHER; note = 2'-deoxy-2'-fluoroadenosine-3'-phosphorothioate
  modified_base 3: mod_base = OTHER; note = 2'-O-methylguanosine-3'-phosphate
  modified_base 4: mod_base = OTHER; note = 2'-O-methyladenosine-3'-phosphate
  modified_base 5: mod_base = OTHER; note = 2'-O-methyladenosine-3'-phosphate
  modified_base 6: mod_base = OTHER; note = 2'-deoxy-2'-fluoroadenosine-3'-phosphate
  modified_base 7: mod_base = OTHER; note = 2'-O-methyluridine-3'-phosphate
  modified_base 8: mod_base = OTHER; note = 2'-deoxy-2'-fluorouridine-3'-phosphate
  modified_base 9: mod_base = OTHER; note = 2'-deoxy-2'-fluorocytidine-3'-phosphate
  modified_base 10: mod_base = OTHER; note = 2'-O-methylcytidine-3'-phosphate
  modified_base 11: mod_base = OTHER; note = 2'-O-methyluridine-3'-phosphate
  modified_base 12: mod_base = OTHER; note = 2'-O-methyluridine-3'-phosphate
  modified_base 13: mod_base = OTHER; note = 2'-O-methylguanosine-3'-phosphate
  modified_base 14: mod_base = OTHER; note = 2'-deoxy-2'-fluorouridine-3'-phosphate
  modified_base 15: mod_base = OTHER; note = 2'-O-methyladenosine-3'-phosphate
  modified_base 16: mod_base = OTHER; note = 2'-deoxy-2'-fluoroguanosine-3'-phosphate
  modified_base 17: mod_base = OTHER; note = 2'-O-methylcytidine-3'-phosphate
  modified_base 18: mod_base = OTHER; note = 2'-O-methylcytidine-3'-phosphate
  modified_base 19: mod_base = OTHER; note = 2'-O-methyladenosine-3'-phosphate
  modified_base 20: mod_base = OTHER; note = 2'-O-methylguanosine-3'-phosphate
  modified_base 21: mod_base = OTHER; note = 2'-O-methylcytidine-3'-phosphorothioate
  modified_base 22: mod_base = OTHER; note = 2'-O-methyladenosine-3'-phosphorothioate
  modified_base 23: mod_base = OTHER; note = 2'-O-methyluridine
aagaaattccttgtagccagcat

SEQ ID NO: 5936 - RNA, 23 nt, synthetic construct
  source 1..23: mol_type = other RNA
  modified_base 1: mod_base = OTHER; note = 2'-O-methyladenosine-3'-phosphorothioate
  modified_base 2: mod_base = OTHER; note = 2'-deoxy-2'-fluorocytidine-3'-phosphorothioate
  modified_base 3: mod_base = OTHER; note = 2'-O-methyladenosine-3'-phosphate
  modified_base 4: mod_base = OTHER; note = 2'-O-methyladenosine-3'-phosphate
  modified_base 5: mod_base = OTHER; note = 2'-O-methylcytidine-3'-phosphate
  modified_base 6: mod_base = OTHER; note = 2'-deoxy-2'-fluoroadenosine-3'-phosphate
  modified_base 7: mod_base = OTHER; note = 2'-O-methyladenosine-3'-phosphate
  modified_base 8: mod_base = OTHER; note = 2'-deoxy-2'-fluoroadenosine-3'-phosphate
  modified_base 9: mod_base = OTHER; note = 2'-deoxy-2'-fluorocytidine-3'-phosphate
  modified_base 10: mod_base = OTHER; note = 2'-O-methyluridine-3'-phosphate
  modified_base 11: mod_base = OTHER; note = 2'-O-methylcytidine-3'-phosphate
  modified_base 12: mod_base = OTHER; note = 2'-O-methyluridine-3'-phosphate
  modified_base 13: mod_base = OTHER; note = 2'-O-methyluridine-3'-phosphate
  modified_base 14: mod_base = OTHER; note = 2'-deoxy-2'-fluoroguanosine-3'-phosphate
  modified_base 15: mod_base = OTHER; note = 2'-O-methylguanosine-3'-phosphate
  modified_base 16: mod_base = OTHER; note = 2'-deoxy-2'-fluorocytidine-3'-phosphate
  modified_base 17: mod_base = OTHER; note = 2'-O-methyluridine-3'-phosphate
  modified_base 18: mod_base = OTHER; note = 2'-O-methylguanosine-3'-phosphate
  modified_base 19: mod_base = OTHER; note = 2'-O-methylcytidine-3'-phosphate
  modified_base 20: mod_base = OTHER; note = 2'-O-methyluridine-3'-phosphate
  modified_base 21: mod_base = OTHER; note = 2'-O-methylguanosine-3'-phosphorothioate
  modified_base 22: mod_base = OTHER; note = 2'-O-methyladenosine-3'-phosphorothioate
  modified_base 23: mod_base = OTHER; note = 2'-O-methylguanosine
acaacaaactcttggctgctgag

SEQ ID NO: 5937 - RNA, 23 nt, synthetic construct
  source 1..23: mol_type = other RNA
  modified_base 1: mod_base = OTHER; note = 2'-O-methyladenosine-3'-phosphorothioate
  modified_base 2: mod_base = OTHER; note = 2'-deoxy-2'-fluorocytidine-3'-phosphorothioate
  modified_base 3: mod_base = OTHER; note = 2'-O-methyluridine-3'-phosphate
  modified_base 4: mod_base = OTHER; note = 2'-O-methyluridine-3'-phosphate
  modified_base 5: mod_base = OTHER; note = 2'-O-methyluridine-3'-phosphate
  modified_base 6: mod_base = OTHER; note = 2'-deoxy-2'-fluoroadenosine-3'-phosphate
  modified_base 7: mod_base = OTHER; note = 2'-O-methylcytidine-3'-phosphate
  modified_base 8: mod_base = OTHER; note = 2'-deoxy-2'-fluorouridine-3'-phosphate
  modified_base 9: mod_base = OTHER; note = 2'-deoxy-2'-fluorocytidine-3'-phosphate
  modified_base 10: mod_base = OTHER; note = 2'-O-methylcytidine-3'-phosphate
  modified_base 11: mod_base = OTHER; note = 2'-O-methyladenosine-3'-phosphate
  modified_base 12: mod_base = OTHER; note = 2'-O-methyluridine-3'-phosphate
  modified_base 13: mod_base = OTHER; note = 2'-O-methylcytidine-3'-phosphate
  modified_base 14: mod_base = OTHER; note = 2'-deoxy-2'-fluorouridine-3'-phosphate
  modified_base 15: mod_base = OTHER; note = 2'-O-methylguanosine-3'-phosphate
  modified_base 16: mod_base = OTHER; note = 2'-deoxy-2'-fluoroguanosine-3'-phosphate
  modified_base 17: mod_base = OTHER; note = 2'-O-methyluridine-3'-phosphate
  modified_base 18: mod_base = OTHER; note = 2'-O-methyluridine-3'-phosphate
  modified_base 19: mod_base = OTHER; note = 2'-O-methyluridine-3'-phosphate
  modified_base 20: mod_base = OTHER; note = 2'-O-methylcytidine-3'-phosphate
  modified_base 21: mod_base = OTHER; note = 2'-O-methyluridine-3'-phosphorothioate
  modified_base 22: mod_base = OTHER; note = 2'-O-methyluridine-3'-phosphorothioate
  modified_base 23: mod_base = OTHER; note = 2'-O-methylcytidine
actttactccatctggtttcttc

SEQ ID NO: 5938 - RNA, 23 nt, synthetic construct
  source 1..23: mol_type = other RNA
  modified_base 1: mod_base = OTHER; note = 2'-O-methyladenosine-3'-phosphorothioate
  modified_base 2: mod_base = OTHER; note = 2'-deoxy-2'-fluorocytidine-3'-phosphorothioate
  modified_base 3: mod_base = OTHER; note = 2'-O-methylguanosine-3'-phosphate
  modified_base 4: mod_base = OTHER; note = 2'-O-methyluridine-3'-phosphate
  modified_base 5: mod_base = OTHER; note = 2'-O-methyluridine-3'-phosphate
  modified_base 6: mod_base = OTHER; note = 2'-deoxy-2'-fluoroguanosine-3'-phosphate
  modified_base 7: mod_base = OTHER; note = 2'-O-methylguanosine-3'-phosphate
  modified_base 8: mod_base = OTHER; note = 2'-deoxy-2'-fluorocytidine-3'-phosphate
  modified_base 9: mod_base = OTHER; note = 2'-deoxy-2'-fluorouridine-3'-phosphate
  modified_base 10: mod_base = OTHER; note = 2'-O-methyluridine-3'-phosphate
  modified_base 11: mod_base = OTHER; note = 2'-O-methyluridine-3'-phosphate
  modified_base 12: mod_base = OTHER; note = 2'-O-methylguanosine-3'-phosphate
  modified_base 13: mod_base = OTHER; note = 2'-O-methyluridine-3'-phosphate
  modified_base 14: mod_base = OTHER; note = 2'-deoxy-2'-fluorouridine-3'-phosphate
  modified_base 15: mod_base = OTHER; note = 2'-O-methylguanosine-3'-phosphate
  modified_base 16: mod_base = OTHER; note = 2'-deoxy-2'-fluorouridine-3'-phosphate
  modified_base 17: mod_base = OTHER; note = 2'-O-methyluridine-3'-phosphate
  modified_base 18: mod_base = OTHER; note = 2'-O-methyluridine-3'-phosphate
  modified_base 19: mod_base = OTHER; note = 2'-O-methyladenosine-3'-phosphate
  modified_base 20: mod_base = OTHER; note = 2'-O-methyluridine-3'-phosphate
  modified_base 21: mod_base = OTHER; note = 2'-O-methylcytidine-3'-phosphorothioate
  modified_base 22: mod_base = OTHER; note = 2'-O-methyluridine-3'-phosphorothioate
  modified_base 23: mod_base = OTHER; note = 2'-O-methyluridine
acgttggctttgttgtttatctt

SEQ ID NO: 5939 - RNA, 23 nt, synthetic construct
  source 1..23: mol_type = other RNA
  modified_base 1: mod_base = OTHER; note = 2'-O-methyladenosine-3'-phosphorothioate
  modified_base 2: mod_base = OTHER; note = 2'-deoxy-2'-fluoroadenosine-3'-phosphorothioate
  modified_base 3: mod_base = OTHER; note = 2'-O-methylguanosine-3'-phosphate
  modified_base 4: mod_base = OTHER; note = 2'-O-methylguanosine-3'-phosphate
  modified_base 5: mod_base = OTHER; note = 2'-O-methylguanosine-3'-phosphate
  modified_base 6: mod_base = OTHER; note = 2'-deoxy-2'-fluorouridine-3'-phosphate
  modified_base 7: mod_base = OTHER; note = 2'-O-methyluridine-3'-phosphate
  modified_base 8: mod_base = OTHER; note = 2'-deoxy-2'-fluoroguanosine-3'-phosphate
  modified_base 9: mod_base = OTHER; note = 2'-deoxy-2'-fluorouridine-3'-phosphate
  modified_base 10: mod_base = OTHER; note = 2'-O-methylguanosine-3'-phosphate
  modified_base 11: mod_base = OTHER; note = 2'-O-methylguanosine-3'-phosphate
  modified_base 12: mod_base = OTHER; note = 2'-O-methyladenosine-3'-phosphate
  modified_base 13: mod_base = OTHER; note = 2'-O-methyluridine-3'-phosphate
  modified_base 14: mod_base = OTHER; note = 2'-deoxy-2'-fluorouridine-3'-phosphate
  modified_base 15: mod_base = OTHER; note = 2'-O-methyladenosine-3'-phosphate
  modified_base 16: mod_base = OTHER; note = 2'-deoxy-2'-fluorocytidine-3'-phosphate
  modified_base 17: mod_base = OTHER; note = 2'-O-methyladenosine-3'-phosphate
  modified_base 18: mod_base = OTHER; note = 2'-O-methylguanosine-3'-phosphate
  modified_base 19: mod_base = OTHER; note = 2'-O-methyluridine-3'-phosphate
  modified_base 20: mod_base = OTHER; note = 2'-O-methyladenosine-3'-phosphate
  modified_base 21: mod_base = OTHER; note = 2'-O-methylguanosine-3'-phosphorothioate
  modified_base 22: mod_base = OTHER; note = 2'-O-methyluridine-3'-phosphorothioate
  modified_base 23: mod_base = OTHER; note = 2'-O-methyluridine
aagggttgtggattacagtagtt

SEQ ID NO: 5940 - RNA, 23 nt, synthetic construct
  source 1..23: mol_type = other RNA
  modified_base 1: mod_base = OTHER; note = 2'-O-methyladenosine-3'-phosphorothioate
  modified_base 2: mod_base = OTHER; note = 2'-deoxy-2'-fluorouridine-3'-phosphorothioate
  modified_base 3: mod_base = OTHER; note = 2'-O-methyluridine-3'-phosphate
  modified_base 4: mod_base = OTHER; note = 2'-O-methylguanosine-3'-phosphate
  modified_base 5: mod_base = OTHER; note = 2'-O-methyladenosine-3'-phosphate
  modified_base 6: mod_base = OTHER; note = 2'-deoxy-2'-fluorocytidine-3'-phosphate
  modified_base 7: mod_base = OTHER; note = 2'-O-methyluridine-3'-phosphate
  modified_base 8: mod_base = OTHER; note = 2'-deoxy-2'-fluorocytidine-3'-phosphate
  modified_base 9: mod_base = OTHER; note = 2'-deoxy-2'-fluorocytidine-3'-phosphate
  modified_base 10: mod_base = OTHER; note = 2'-O-methyluridine-3'-phosphate
  modified_base 11: mod_base = OTHER; note = 2'-O-methyluridine-3'-phosphate
  modified_base 12: mod_base = OTHER; note = 2'-O-methylguanosine-3'-phosphate
  modified_base 13: mod_base = OTHER; note = 2'-O-methyluridine-3'-phosphate
  modified_base 14: mod_base = OTHER; note = 2'-deoxy-2'-fluorouridine-3'-phosphate
  modified_base 15: mod_base = OTHER; note = 2'-O-methyluridine-3'-phosphate
  modified_base 16: mod_base = OTHER; note = 2'-deoxy-2'-fluorocytidine-3'-phosphate
  modified_base 17: mod_base = OTHER; note = 2'-O-methylcytidine-3'-phosphate
  modified_base 18: mod_base = OTHER; note = 2'-O-methyladenosine-3'-phosphate
  modified_base 19: mod_base = OTHER; note = 2'-O-methyluridine-3'-phosphate
  modified_base 20: mod_base = OTHER; note = 2'-O-methylcytidine-3'-phosphate
  modified_base 21: mod_base = OTHER; note = 2'-O-methyladenosine-3'-phosphorothioate
  modified_base 22: mod_base = OTHER; note = 2'-O-methylguanosine-3'-phosphorothioate
  modified_base 23: mod_base = OTHER; note = 2'-O-methylguanosine
attgactccttgtttccatcagg

SEQ ID NO: 5941 - RNA, 23 nt, synthetic construct
  source 1..23: mol_type = other RNA
  modified_base 1: mod_base = OTHER; note = 2'-O-methyladenosine-3'-phosphorothioate
  modified_base 2: mod_base = OTHER; note = 2'-deoxy-2'-fluoroadenosine-3'-phosphorothioate
  modified_base 3: mod_base = OTHER; note = 2'-O-methyladenosine-3'-phosphate
  modified_base 4: mod_base = OTHER; note = 2'-O-methyluridine-3'-phosphate
  modified_base 5: mod_base = OTHER; note = 2'-O-methyluridine-3'-phosphate
  modified_base 6: mod_base = OTHER; note = 2'-deoxy-2'-fluoroguanosine-3'-phosphate
  modified_base 7: mod_base = OTHER; note = 2'-O-methyluridine-3'-phosphate
  modified_base 8: mod_base = OTHER; note = 2'-deoxy-2'-fluorouridine-3'-phosphate
  modified_base 9: mod_base = OTHER; note = 2'-deoxy-2'-fluoroguanosine-3'-phosphate
  modified_base 10: mod_base = OTHER; note = 2'-O-methyluridine-3'-phosphate
  modified_base 11: mod_base = OTHER; note = 2'-O-methyladenosine-3'-phosphate
  modified_base 12: mod_base = OTHER; note = 2'-O-methyluridine-3'-phosphate
  modified_base 13: mod_base = OTHER; note = 2'-O-methyluridine-3'-phosphate
  modified_base 14: mod_base = OTHER; note = 2'-deoxy-2'-fluorouridine-3'-phosphate
  modified_base 15: mod_base = OTHER; note = 2'-O-methylguanosine-3'-phosphate
  modified_base 16: mod_base = OTHER; note = 2'-deoxy-2'-fluoroadenosine-3'-phosphate
  modified_base 17: mod_base = OTHER; note = 2'-O-methyladenosine-3'-phosphate
  modified_base 18: mod_base = OTHER; note = 2'-O-methylcytidine-3'-phosphate
  modified_base 19: mod_base = OTHER; note = 2'-O-methyluridine-3'-phosphate
  modified_base 20: mod_base = OTHER; note = 2'-O-methylcytidine-3'-phosphate
  modified_base 21: mod_base = OTHER; note = 2'-O-methyluridine-3'-phosphorothioate
  modified_base 22: mod_base = OTHER; note = 2'-O-methylcytidine-3'-phosphorothioate
  modified_base 23: mod_base = OTHER; note = 2'-O-methyladenosine
aaattgttgtatttgaactctca

SEQ ID NO: 5942 - RNA, 23 nt, synthetic construct
  source 1..23: mol_type = other RNA
  modified_base 1: mod_base = OTHER; note = 2'-O-methyladenosine-3'-phosphorothioate
  modified_base 2: mod_base = OTHER; note = 2'-deoxy-2'-fluorouridine-3'-phosphorothioate
  modified_base 3: mod_base = OTHER; note = 2'-O-methyluridine-3'-phosphate
  modified_base 4: mod_base = OTHER; note = 2'-O-methyluridine-3'-phosphate
  modified_base 5: mod_base = OTHER; note = 2'-O-methylcytidine-3'-phosphate
  modified_base 6: mod_base = OTHER; note = 2'-deoxy-2'-fluoroguanosine-3'-phosphate
  modified_base 7: mod_base = OTHER; note = 2'-O-methyluridine-3'-phosphate
  modified_base 8: mod_base = OTHER; note = 2'-deoxy-2'-fluoroguanosine-3'-phosphate
  modified_base 9: mod_base = OTHER; note = 2'-deoxy-2'-fluorocytidine-3'-phosphate
  modified_base 10: mod_base = OTHER; note = 2'-O-methyluridine-3'-phosphate
  modified_base 11: mod_base = OTHER; note = 2'-O-methyluridine-3'-phosphate
  modified_base 12: mod_base = OTHER; note = 2'-O-methyluridine-3'-phosphate
  modified_base 13: mod_base = OTHER; note = 2'-O-methylcytidine-3'-phosphate
  modified_base 14: mod_base = OTHER; note = 2'-deoxy-2'-fluoroadenosine-3'-phosphate
  modified_base 15: mod_base = OTHER; note = 2'-O-methylcytidine-3'-phosphate
  modified_base 16: mod_base = OTHER; note = 2'-deoxy-2'-fluoroadenosine-3'-phosphate
  modified_base 17: mod_base = OTHER; note = 2'-O-methyluridine-3'-phosphate
  modified_base 18: mod_base = OTHER; note = 2'-O-methylcytidine-3'-phosphate
  modified_base 19: mod_base = OTHER; note = 2'-O-methyluridine-3'-phosphate
  modified_base 20: mod_base = OTHER; note = 2'-O-methyluridine-3'-phosphate
  modified_base 21: mod_base = OTHER; note = 2'-O-methylcytidine-3'-phosphorothioate
  modified_base 22: mod_base = OTHER; note = 2'-O-methyladenosine-3'-phosphorothioate
  modified_base 23: mod_base = OTHER; note = 2'-O-methyluridine
atttcgtgctttcacatcttcat

SEQ ID NO: 5943 - RNA, 23 nt, synthetic construct
  source 1..23: mol_type = other RNA
  modified_base 1: mod_base = OTHER; note = 2'-O-methyladenosine-3'-phosphorothioate
  modified_base 2: mod_base = OTHER; note = 2'-deoxy-2'-fluorouridine-3'-phosphorothioate
  modified_base 3: mod_base = OTHER; note = 2'-O-methyluridine-3'-phosphate
  modified_base 4: mod_base = OTHER; note = 2'-O-methylguanosine-3'-phosphate
  modified_base 5: mod_base = OTHER; note = 2'-O-methyladenosine-3'-phosphate
  modified_base 6: mod_base = OTHER; note = 2'-deoxy-2'-fluorouridine-3'-phosphate
  modified_base 7: mod_base = OTHER; note = 2'-O-methyladenosine-3'-phosphate
  modified_base 8: mod_base = OTHER; note = 2'-deoxy-2'-fluoroadenosine-3'-phosphate
  modified_base 9: mod_base = OTHER; note = 2'-deoxy-2'-fluorouridine-3'-phosphate
  modified_base 10: mod_base = OTHER; note = 2'-O-methylcytidine-3'-phosphate
  modified_base 11: mod_base = OTHER; note = 2'-O-methyluridine-3'-phosphate
  modified_base 12: mod_base = OTHER; note = 2'-O-methylcytidine-3'-phosphate
  modified_base 13: mod_base = OTHER; note = 2'-O-methyluridine-3'-phosphate
  modified_base 14: mod_base = OTHER; note = 2'-deoxy-2'-fluorouridine-3'-phosphate
  modified_base 15: mod_base = OTHER; note = 2'-O-methylguanosine-3'-phosphate
  modified_base 16: mod_base = OTHER; note = 2'-deoxy-2'-fluorocytidine-3'-phosphate
  modified_base 17: mod_base = OTHER; note = 2'-O-methyluridine-3'-phosphate
  modified_base 18: mod_base = OTHER; note = 2'-O-methyluridine-3'-phosphate
  modified_base 19: mod_base = OTHER; note = 2'-O-methyluridine-3'-phosphate
  modified_base 20: mod_base = OTHER; note = 2'-O-methylcytidine-3'-phosphate
  modified_base 21: mod_base = OTHER; note = 2'-O-methylguanosine-3'-phosphorothioate
  modified_base 22: mod_base = OTHER; note = 2'-O-methyluridine-3'-phosphorothioate
  modified_base 23: mod_base = OTHER; note = 2'-O-methylguanosine
attgataatctcttgctttcgtg

SEQ ID NO: 5944 - RNA, 23 nt, synthetic construct
  source 1..23: mol_type = other RNA
  modified_base 1: mod_base = OTHER; note = 2'-O-methyladenosine-3'-phosphorothioate
  modified_base 2: mod_base = OTHER; note = 2'-deoxy-2'-fluoroguanosine-3'-phosphorothioate
  modified_base 3: mod_base = OTHER; note = 2'-O-methyladenosine-3'-phosphate
  modified_base 4: mod_base = OTHER; note = 2'-O-methyluridine-3'-phosphate
  modified_base 5: mod_base = OTHER; note = 2'-O-methylcytidine-3'-phosphate
  modified_base 6: mod_base = OTHER; note = 2'-deoxy-2'-fluoroadenosine-3'-phosphate
  modified_base 7: mod_base = OTHER; note = 2'-O-methylguanosine-3'-phosphate
  modified_base 8: mod_base = OTHER; note = 2'-deoxy-2'-fluorouridine-3'-phosphate
  modified_base 9: mod_base = OTHER; note = 2'-deoxy-2'-fluorouridine-3'-phosphate
  modified_base 10: mod_base = OTHER; note = 2'-O-methylguanosine-3'-phosphate
  modified_base 11: mod_base = OTHER; note = 2'-O-methyluridine-3'-phosphate
  modified_base 12: mod_base = OTHER; note = 2'-O-methyluridine-3'-phosphate
  modified_base 13: mod_base = OTHER; note = 2'-O-methylcytidine-3'-phosphate
  modified_base 14: mod_base = OTHER; note = 2'-deoxy-2'-fluoroadenosine-3'-phosphate
  modified_base 15: mod_base = OTHER; note = 2'-O-methylguanosine-3'-phosphate
  modified_base 16: mod_base = OTHER; note = 2'-deoxy-2'-fluorouridine-3'-phosphate
  modified_base 17: mod_base = OTHER; note = 2'-O-methylguanosine-3'-phosphate
  modified_base 18: mod_base = OTHER; note = 2'-O-methyladenosine-3'-phosphate
  modified_base 19: mod_base = OTHER; note = 2'-O-methylcytidine-3'-phosphate
  modified_base 20: mod_base = OTHER; note = 2'-O-methyluridine-3'-phosphate
  modified_base 21: mod_base = OTHER; note = 2'-O-methyluridine-3'-phosphorothioate
  modified_base 22: mod_base = OTHER; note = 2'-O-methyluridine-3'-phosphorothioate
  modified_base 23: mod_base = OTHER; note = 2'-O-methylguanosine
agatcagttgttcagtgactttg

SEQ ID NO: 5945 - RNA, 23 nt, synthetic construct
  source 1..23: mol_type = other RNA
  modified_base 1: mod_base = OTHER; note = 2'-O-methyladenosine-3'-phosphorothioate
  modified_base 2: mod_base = OTHER; note = 2'-deoxy-2'-fluoroadenosine-3'-phosphorothioate
  modified_base 3: mod_base = OTHER; note = 2'-O-methyluridine-3'-phosphate
  modified_base 4: mod_base = OTHER; note = 2'-O-methyluridine-3'-phosphate
  modified_base 5: mod_base = OTHER; note = 2'-O-methylguanosine-3'-phosphate
  modified_base 6: mod_base = OTHER; note = 2'-deoxy-2'-fluorouridine-3'-phosphate
  modified_base 7: mod_base = OTHER; note = 2'-O-methyluridine-3'-phosphate
  modified_base 8: mod_base = OTHER; note = 2'-deoxy-2'-fluoroguanosine-3'-phosphate
  modified_base 9: mod_base = OTHER; note = 2'-deoxy-2'-fluoroadenosine-3'-phosphate
  modified_base 10: mod_base = OTHER; note = 2'-O-methyluridine-3'-phosphate
  modified_base 11: mod_base = OTHER; note = 2'-O-methyladenosine-3'-phosphate
  modified_base 12: mod_base = OTHER; note = 2'-O-methylguanosine-3'-phosphate
  modified_base 13: mod_base = OTHER; note = 2'-O-methylcytidine-3'-phosphate
  modified_base 14: mod_base = OTHER; note = 2'-deoxy-2'-fluorouridine-3'-phosphate
  modified_base 15: mod_base = OTHER; note = 2'-O-methyluridine-3'-phosphate
  modified_base 16: mod_base = OTHER; note = 2'-deoxy-2'-fluorocytidine-3'-phosphate
  modified_base 17: mod_base = OTHER; note = 2'-O-methylguanosine-3'-phosphate
  modified_base 18: mod_base = OTHER; note = 2'-O-methyladenosine-3'-phosphate
  modified_base 19: mod_base = OTHER; note = 2'-O-methyluridine-3'-phosphate
  modified_base 20: mod_base = OTHER; note = 2'-O-methylcytidine-3'-phosphate
  modified_base 21: mod_base = OTHER; note = 2'-O-methyladenosine-3'-phosphorothioate
  modified_base 22: mod_base = OTHER; note = 2'-O-methylguanosine-3'-phosphorothioate
  modified_base 23: mod_base = OTHER; note = 2'-O-methyluridine
aattgttgatagcttcgatcagt

SEQ ID NO: 5946 - RNA, 23 nt, synthetic construct
  source 1..23: mol_type = other RNA
  modified_base 1: mod_base = OTHER; note = 2'-O-methyladenosine-3'-phosphorothioate
  modified_base 2: mod_base = OTHER; note = 2'-deoxy-2'-fluorouridine-3'-phosphorothioate
  modified_base 3: mod_base = OTHER; note = 2'-O-methyluridine-3'-phosphate
  modified_base 4: mod_base = OTHER; note = 2'-O-methyluridine-3'-phosphate
  modified_base 5: mod_base = OTHER; note = 2'-O-methylguanosine-3'-phosphate
  modified_base 6: mod_base = OTHER; note = 2'-deoxy-2'-fluorouridine-3'-phosphate
  modified_base 7: mod_base = OTHER; note = 2'-O-methylguanosine-3'-phosphate
  modified_base 8: mod_base = OTHER; note = 2'-deoxy-2'-fluorouridine-3'-phosphate
  modified_base 9: mod_base = OTHER; note = 2'-deoxy-2'-fluoroadenosine-3'-phosphate
  modified_base 10: mod_base = OTHER; note = 2'-O-methylguanosine-3'-phosphate
  modified_base 11: mod_base = OTHER; note = 2'-O-methylguanosine-3'-phosphate
  modified_base 12: mod_base = OTHER; note = 2'-O-methylcytidine-3'-phosphate
  modified_base 13: mod_base = OTHER; note = 2'-O-methyluridine-3'-phosphate
  modified_base 14: mod_base = OTHER; note = 2'-deoxy-2'-fluorouridine-3'-phosphate
  modified_base 15: mod_base = OTHER; note = 2'-O-methylcytidine-3'-phosphate
  modified_base 16: mod_base = OTHER; note = 2'-deoxy-2'-fluoroadenosine-3'-phosphate
  modified_base 17: mod_base = OTHER; note = 2'-O-methyladenosine-3'-phosphate
  modified_base 18: mod_base = OTHER; note = 2'-O-methyladenosine-3'-phosphate
  modified_base 19: mod_base = OTHER; note = 2'-O-methylguanosine-3'-phosphate
  modified_base 20: mod_base = OTHER; note = 2'-O-methyluridine-3'-phosphate
  modified_base 21: mod_base = OTHER; note = 2'-O-methylcytidine-3'-phosphorothioate
  modified_base 22: mod_base = OTHER; note = 2'-O-methylcytidine-3'-phosphorothioate
  modified_base 23: mod_base = OTHER; note = 2'-O-methylcytidine
atttgtgtaggcttcaaagtccc

SEQ ID NO: 5947 - RNA, 23 nt, synthetic construct
  source 1..23: mol_type = other RNA
  modified_base 1: mod_base = OTHER; note = 2'-O-methyladenosine-3'-phosphorothioate
  modified_base 2: mod_base = OTHER; note = 2'-deoxy-2'-fluorocytidine-3'-phosphorothioate
  modified_base 3: mod_base = OTHER; note = 2'-O-methyluridine-3'-phosphate
  modified_base 4: mod_base = OTHER; note = 2'-O-methyluridine-3'-phosphate
  modified_base 5: mod_base = OTHER; note = 2'-O-methylcytidine-3'-phosphate
  modified_base 6: mod_base = OTHER; note = 2'-deoxy-2'-fluoroadenosine-3'-phosphate
  modified_base 7: mod_base = OTHER; note = 2'-O-methylguanosine-3'-phosphate
  modified_base 8: mod_base = OTHER; note = 2'-deoxy-2'-fluoroguanosine-3'-phosphate
  modified_base 9: mod_base = OTHER; note = 2'-deoxy-2'-fluorouridine-3'-phosphate
  modified_base 10: mod_base = OTHER; note = 2'-O-methyluridine-3'-phosphate
  modified_base 11: mod_base = OTHER; note = 2'-O-methylcytidine-3'-phosphate
  modified_base 12: mod_base = OTHER; note = 2'-O-methyladenosine-3'-phosphate
  modified_base 13: mod_base = OTHER; note = 2'-O-methyladenosine-3'-phosphate
  modified_base 14: mod_base = OTHER; note = 2'-deoxy-2'-fluoroadenosine-3'-phosphate
  modified_base 15: mod_base = OTHER; note = 2'-O-methyladenosine-3'-phosphate
  modified_base 16: mod_base = OTHER; note = 2'-deoxy-2'-fluoroguanosine-3'-phosphate
  modified_base 17: mod_base = OTHER; note = 2'-O-methylcytidine-3'-phosphate
  modified_base 18: mod_base = OTHER; note = 2'-O-methyladenosine-3'-phosphate
  modified_base 19: mod_base = OTHER; note = 2'-O-methylguanosine-3'-phosphate
  modified_base 20: mod_base = OTHER; note = 2'-O-methyluridine-3'-phosphate
  modified_base 21: mod_base = OTHER; note = 2'-O-methyladenosine-3'-phosphorothioate
  modified_base 22: mod_base = OTHER; note = 2'-O-methyladenosine-3'-phosphorothioate
  modified_base 23: mod_base = OTHER; note = 2'-O-methylguanosine
acttcaggttcaaaagcagtaag

SEQ ID NO: 5948 - RNA, 23 nt, synthetic construct
  source 1..23: mol_type = other RNA
  modified_base 1: mod_base = OTHER; note = 2'-O-methyladenosine-3'-phosphorothioate
  modified_base 2: mod_base = OTHER; note = 2'-deoxy-2'-fluoroadenosine-3'-phosphorothioate
  modified_base 3: mod_base = OTHER; note = 2'-O-methylcytidine-3'-phosphate
  modified_base 4: mod_base = OTHER; note = 2'-O-methyluridine-3'-phosphate
  modified_base 5: mod_base = OTHER; note = 2'-O-methyladenosine-3'-phosphate
  modified_base 6: mod_base = OTHER; note = 2'-deoxy-2'-fluoroadenosine-3'-phosphate
  modified_base 7: mod_base = OTHER; note = 2'-O-methyladenosine-3'-phosphate
  modified_base 8: mod_base = OTHER; note = 2'-deoxy-2'-fluorouridine-3'-phosphate
  modified_base 9: mod_base = OTHER; note = 2'-deoxy-2'-fluorouridine-3'-phosphate
  modified_base 10: mod_base = OTHER; note = 2'-O-methyladenosine-3'-phosphate
  modified_base 11: mod_base = OTHER; note = 2'-O-methylcytidine-3'-phosphate
  modified_base 12: mod_base = OTHER; note = 2'-O-methylcytidine-3'-phosphate
  modified_base 13: mod_base = OTHER; note = 2'-O-methylcytidine-3'-phosphate
  modified_base 14: mod_base = OTHER; note = 2'-deoxy-2'-fluoroadenosine-3'-phosphate
  modified_base 15: mod_base = OTHER; note = 2'-O-methyladenosine-3'-phosphate
  modified_base 16: mod_base = OTHER; note = 2'-deoxy-2'-fluoroadenosine-3'-phosphate
  modified_base 17: mod_base = OTHER; note = 2'-O-methylguanosine-3'-phosphate
  modified_base 18: mod_base = OTHER; note = 2'-O-methylcytidine-3'-phosphate
  modified_base 19: mod_base = OTHER; note = 2'-O-methyluridine-3'-phosphate
  modified_base 20: mod_base = OTHER; note = 2'-O-methyluridine-3'-phosphate
  modified_base 21: mod_base = OTHER; note = 2'-O-methylcytidine-3'-phosphorothioate
  modified_base 22: mod_base = OTHER; note = 2'-O-methyladenosine-3'-phosphorothioate
  modified_base 23: mod_base = OTHER; note = 2'-O-methylguanosine
aactaaattacccaaagcttcag

SEQ ID NO: 5949 - RNA, 23 nt, synthetic construct
  source 1..23: mol_type = other RNA
  modified_base 1: mod_base = OTHER; note = 2'-O-methyladenosine-3'-phosphorothioate
  modified_base 2: mod_base = OTHER; note = 2'-deoxy-2'-fluoroadenosine-3'-phosphorothioate
  modified_base 3: mod_base = OTHER; note = 2'-O-methylguanosine-3'-phosphate
  modified_base 4: mod_base = OTHER; note = 2'-O-methyladenosine-3'-phosphate
  modified_base 5: mod_base = OTHER; note = 2'-O-methyladenosine-3'-phosphate
  modified_base 6: mod_base = OTHER; note = 2'-deoxy-2'-fluorouridine-3'-phosphate
  modified_base 7: mod_base = OTHER; note = 2'-O-methylcytidine-3'-phosphate
  modified_base 8: mod_base = OTHER; note = 2'-deoxy-2'-fluoroguanosine-3'-phosphate
  modified_base 9: mod_base = OTHER; note = 2'-deoxy-2'-fluoroguanosine-3'-phosphate
  modified_base 10: mod_base = OTHER; note = 2'-O-methyluridine-3'-phosphate
  modified_base 11: mod_base = OTHER; note = 2'-O-methylguanosine-3'-phosphate
  modified_base 12: mod_base = OTHER; note = 2'-O-methyladenosine-3'-phosphate
  modified_base 13: mod_base = OTHER; note = 2'-O-methyladenosine-3'-phosphate
  modified_base 14: mod_base = OTHER; note = 2'-deoxy-2'-fluoroadenosine-3'-phosphate
  modified_base 15: mod_base = OTHER; note = 2'-O-methyladenosine-3'-phosphate
  modified_base 16: mod_base = OTHER; note = 2'-deoxy-2'-fluorouridine-3'-phosphate
  modified_base 17: mod_base = OTHER; note = 2'-O-methylcytidine-3'-phosphate
  modified_base 18: mod_base = OTHER; note = 2'-O-methylcytidine-3'-phosphate
  modified_base 19: mod_base = OTHER; note = 2'-O-methyladenosine-3'-phosphate
  modified_base 20: mod_base = OTHER; note = 2'-O-methyluridine-3'-phosphate
  modified_base 21: mod_base = OTHER; note = 2'-O-methylcytidine-3'-phosphorothioate
  modified_base 22: mod_base = OTHER; note = 2'-O-methylcytidine-3'-phosphorothioate
  modified_base 23: mod_base = OTHER; note = 2'-O-methylcytidine
aagaatcggtgaaaatccatccc

SEQ ID NO: 5950 - RNA, 23 nt, synthetic construct
  source 1..23: mol_type = other RNA
  modified_base 1: mod_base = OTHER; note = 2'-O-methyladenosine-3'-phosphorothioate
  modified_base 2: mod_base = OTHER; note = 2'-deoxy-2'-fluoroadenosine-3'-phosphorothioate
  modified_base 3: mod_base = OTHER; note = 2'-O-methyladenosine-3'-phosphate
  modified_base 4: mod_base = OTHER; note = 2'-O-methyladenosine-3'-phosphate
  modified_base 5: mod_base = OTHER; note = 2'-O-methylguanosine-3'-phosphate
  modified_base 6: mod_base = OTHER; note = 2'-deoxy-2'-fluorocytidine-3'-phosphate
  modified_base 7: mod_base = OTHER; note = 2'-O-methyladenosine-3'-phosphate
  modified_base 8: mod_base = OTHER; note = 2'-deoxy-2'-fluorouridine-3'-phosphate
  modified_base 9: mod_base = OTHER; note = 2'-deoxy-2'-fluorouridine-3'-phosphate
  modified_base 10: mod_base = OTHER; note = 2'-O-methyluridine-3'-phosphate
  modified_base 11: mod_base = OTHER; note = 2'-O-methyluridine-3'-phosphate
  modified_base 12: mod_base = OTHER; note = 2'-O-methylcytidine-3'-phosphate
  modified_base 13: mod_base = OTHER; note = 2'-O-methyladenosine-3'-phosphate
  modified_base 14: mod_base = OTHER; note = 2'-deoxy-2'-fluoroadenosine-3'-phosphate
  modified_base 15: mod_base = OTHER; note = 2'-O-methyladenosine-3'-phosphate
  modified_base 16: mod_base = OTHER; note = 2'-deoxy-2'-fluoroguanosine-3'-phosphate
  modified_base 17: mod_base = OTHER; note = 2'-O-methyluridine-3'-phosphate
  modified_base 18: mod_base = OTHER; note = 2'-O-methyladenosine-3'-phosphate
  modified_base 19: mod_base = OTHER; note = 2'-O-methylguanosine-3'-phosphate
  modified_base 20: mod_base = OTHER; note = 2'-O-methyladenosine-3'-phosphate
  modified_base 21: mod_base = OTHER; note = 2'-O-methyladenosine-3'-phosphorothioate
  modified_base 22: mod_base = OTHER; note = 2'-O-methyluridine-3'-phosphorothioate
  modified_base 23: mod_base = OTHER; note = 2'-O-methylcytidine
aaaagcattttcaaagtagaatc

SEQ ID NO: 5951 - RNA, 23 nt, synthetic construct
  source 1..23: mol_type = other RNA
  modified_base 1: mod_base = OTHER; note = 2'-O-methyladenosine-3'-phosphorothioate
  modified_base 2: mod_base = OTHER; note = 2'-deoxy-2'-fluoroguanosine-3'-phosphorothioate
  modified_base 3: mod_base = OTHER; note = 2'-O-methyluridine-3'-phosphate
  modified_base 4: mod_base = OTHER; note = 2'-O-methyluridine-3'-phosphate
  modified_base 5: mod_base = OTHER; note = 2'-O-methyluridine-3'-phosphate
  modified_base 6: mod_base = OTHER; note = 2'-deoxy-2'-fluoroadenosine-3'-phosphate
  modified_base 7: mod_base = OTHER; note = 2'-O-methyluridine-3'-phosphate
  modified_base 8: mod_base = OTHER; note = 2'-deoxy-2'-fluorouridine-3'-phosphate
  modified_base 9: mod_base = OTHER; note = 2'-deoxy-2'-fluoroguanosine-3'-phosphate
  modified_base 10: mod_base = OTHER; note = 2'-O-methylcytidine-3'-phosphate
  modified_base 11: mod_base = OTHER; note = 2'-O-methyluridine-3'-phosphate
  modified_base 12: mod_base = OTHER; note = 2'-O-methyluridine-3'-phosphate
  modified_base 13: mod_base = OTHER; note = 2'-O-methyluridine-3'-phosphate
  modified_base 14: mod_base = OTHER; note = 2'-deoxy-2'-fluorouridine-3'-phosphate
  modified_base 15: mod_base = OTHER; note = 2'-O-methylguanosine-3'-phosphate
  modified_base 16: mod_base = OTHER; note = 2'-deoxy-2'-fluoroguanosine-3'-phosphate
  modified_base 17: mod_base = OTHER; note = 2'-O-methyladenosine-3'-phosphate
  modified_base 18: mod_base = OTHER; note = 2'-O-methylcytidine-3'-phosphate
  modified_base 19: mod_base = OTHER; note = 2'-O-methyladenosine-3'-phosphate
  modified_base 20: mod_base = OTHER; note = 2'-O-methyladenosine-3'-phosphate
  modified_base 21: mod_base = OTHER; note = 2'-O-methyladenosine-3'-phosphorothioate
  modified_base 22: mod_base = OTHER; note = 2'-O-methylguanosine-3'-phosphorothioate
  modified_base 23: mod_base = OTHER; note = 2'-O-methylcytidine
agtttattgcttttggacaaagc

SEQ ID NO: 5952 - RNA, 23 nt, synthetic construct
  source 1..23: mol_type = other RNA
  modified_base 1: mod_base = OTHER; note = 2'-O-methyladenosine-3'-phosphorothioate
  modified_base 2: mod_base = OTHER; note = 2'-deoxy-2'-fluoroguanosine-3'-phosphorothioate
  modified_base 3: mod_base = OTHER; note = 2'-O-methyluridine-3'-phosphate
  modified_base 4: mod_base = OTHER; note = 2'-O-methyluridine-3'-phosphate
  modified_base 5: mod_base = OTHER; note = 2'-O-methyluridine-3'-phosphate
  modified_base 6: mod_base = OTHER; note = 2'-deoxy-2'-fluoroadenosine-3'-phosphate
  modified_base 7: mod_base = OTHER; note = 2'-O-methylguanosine-3'-phosphate
  modified_base 8: mod_base = OTHER; note = 2'-deoxy-2'-fluoroadenosine-3'-phosphate
  modified_base 9: mod_base = OTHER; note = 2'-deoxy-2'-fluoroadenosine-3'-phosphate
  modified_base 10: mod_base = OTHER; note = 2'-O-methyluridine-3'-phosphate
  modified_base 11: mod_base = OTHER; note = 2'-O-methyladenosine-3'-phosphate
  modified_base 12: mod_base = OTHER; note = 2'-O-methyladenosine-3'-phosphate
  modified_base 13: mod_base = OTHER; note = 2'-O-methyluridine-3'-phosphate
  modified_base 14: mod_base = OTHER; note = 2'-deoxy-2'-fluoroadenosine-3'-phosphate
  modified_base 15: mod_base = OTHER; note = 2'-O-methylguanosine-3'-phosphate
  modified_base 16: mod_base = OTHER; note = 2'-deoxy-2'-fluorouridine-3'-phosphate
  modified_base 17: mod_base = OTHER; note = 2'-O-methylguanosine-3'-phosphate
  modified_base 18: mod_base = OTHER; note = 2'-O-methyluridine-3'-phosphate
  modified_base 19: mod_base = OTHER; note = 2'-O-methylguanosine-3'-phosphate
  modified_base 20: mod_base = OTHER; note = 2'-O-methylguanosine-3'-phosphate
  modified_base 21: mod_base = OTHER; note = 2'-O-methyladenosine-3'-phosphorothioate
  modified_base 22: mod_base = OTHER; note = 2'-O-methyluridine-3'-phosphorothioate
  modified_base 23: mod_base = OTHER; note = 2'-O-methyluridine
agtttagaataatagtgtggatt

SEQ ID NO: 5953 - RNA, 23 nt, synthetic construct
  source 1..23: mol_type = other RNA
  modified_base 1: mod_base = OTHER; note = 2'-O-methyladenosine-3'-phosphorothioate
  modified_base 2: mod_base = OTHER; note = 2'-deoxy-2'-fluorocytidine-3'-phosphorothioate
  modified_base 3: mod_base = OTHER; note = 2'-O-methyladenosine-3'-phosphate
  modified_base 4: mod_base = OTHER; note = 2'-O-methylguanosine-3'-phosphate
  modified_base 5: mod_base = OTHER; note = 2'-O-methyladenosine-3'-phosphate
  modified_base 6: mod_base = OTHER; note = 2'-deoxy-2'-fluorouridine-3'-phosphate
  modified_base 7: mod_base = OTHER; note = 2'-O-methylguanosine-3'-phosphate
  modified_base 8: mod_base = OTHER; note = 2'-deoxy-2'-fluorouridine-3'-phosphate
  modified_base 9: mod_base = OTHER; note = 2'-deoxy-2'-fluoroadenosine-3'-phosphate
  modified_base 10: mod_base = OTHER; note = 2'-O-methylcytidine-3'-phosphate
  modified_base 11: mod_base = OTHER; note = 2'-O-methyladenosine-3'-phosphate
  modified_base 12: mod_base = OTHER; note = 2'-O-methyluridine-3'-phosphate
  modified_base 13: mod_base = OTHER; note = 2'-O-methylguanosine-3'-phosphate
  modified_base 14: mod_base = OTHER; note = 2'-deoxy-2'-fluoroadenosine-3'-phosphate
  modified_base 15: mod_base = OTHER; note = 2'-O-methylguanosine-3'-phosphate
  modified_base 16: mod_base = OTHER; note = 2'-deoxy-2'-fluoroguanosine-3'-phosphate
  modified_base 17: mod_base = OTHER; note = 2'-O-methylguanosine-3'-phosphate
  modified_base 18: mod_base = OTHER; note = 2'-O-methyluridine-3'-phosphate
  modified_base 19: mod_base = OTHER; note = 2'-O-methyluridine-3'-phosphate
  modified_base 20: mod_base = OTHER; note = 2'-O-methyluridine-3'-phosphate
  modified_base 21: mod_base = OTHER; note = 2'-O-methyladenosine-3'-phosphorothioate
  modified_base 22: mod_base = OTHER; note = 2'-O-methylguanosine-3'-phosphorothioate
  modified_base 23: mod_base = OTHER; note = 2'-O-methyladenosine
acagatgtacatgagggtttaga

SEQ ID NO: 5954 - RNA, 23 nt, synthetic construct
  source 1..23: mol_type = other RNA
  modified_base 1: mod_base = OTHER; note = 2'-O-methyladenosine-3'-phosphorothioate
  modified_base 2: mod_base = OTHER; note = 2'-deoxy-2'-fluorouridine-3'-phosphorothioate
  modified_base 3: mod_base = OTHER; note = 2'-O-methyladenosine-3'-phosphate
  modified_base 4: mod_base = OTHER; note = 2'-O-methyladenosine-3'-phosphate
  modified_base 5: mod_base = OTHER; note = 2'-O-methyluridine-3'-phosphate
  modified_base 6: mod_base = OTHER; note = 2'-deoxy-2'-fluoroadenosine-3'-phosphate
  modified_base 7: mod_base = OTHER; note = 2'-O-methyluridine-3'-phosphate
  modified_base 8: mod_base = OTHER; note = 2'-deoxy-2'-fluoroadenosine-3'-phosphate
  modified_base 9: mod_base = OTHER; note = 2'-deoxy-2'-fluorouridine-3'-phosphate
  modified_base 10: mod_base = OTHER; note = 2'-O-methylguanosine-3'-phosphate
  modified_base 11: mod_base = OTHER; note = 2'-O-methylcytidine-3'-phosphate
  modified_base 12: mod_base = OTHER; note = 2'-O-methyluridine-3'-phosphate
  modified_base 13: mod_base = OTHER; note = 2'-O-methyladenosine-3'-phosphate
  modified_base 14: mod_base = OTHER; note = 2'-deoxy-2'-fluorouridine-3'-phosphate
  modified_base 15: mod_base = OTHER; note = 2'-O-methylguanosine-3'-phosphate
  modified_base 16: mod_base = OTHER; note = 2'-deoxy-2'-fluorocytidine-3'-phosphate
  modified_base 17: mod_base = OTHER; note = 2'-O-methyladenosine-3'-phosphate
  modified_base 18: mod_base = OTHER; note = 2'-O-methylguanosine-3'-phosphate
  modified_base 19: mod_base = OTHER; note = 2'-O-methylguanosine-3'-phosphate
  modified_base 20: mod_base = OTHER; note = 2'-O-methylcytidine-3'-phosphate
  modified_base 21: mod_base = OTHER; note = 2'-O-methylguanosine-3'-phosphorothioate
  modified_base 22: mod_base = OTHER; note = 2'-O-methylguanosine-3'-phosphorothioate
  modified_base 23: mod_base = OTHER; note = 2'-O-methylcytidine
ataatatatgctatgcaggcggc

SEQ ID NO: 5955 - RNA, 23 nt, synthetic construct
  source 1..23: mol_type = other RNA
  modified_base 1: mod_base = OTHER; note = 2'-O-methyladenosine-3'-phosphorothioate
  modified_base 2: mod_base = OTHER; note = 2'-deoxy-2'-fluoroadenosine-3'-phosphorothioate
  modified_base 3: mod_base = OTHER; note = 2'-O-methylcytidine-3'-phosphate
  modified_base 4: mod_base = OTHER; note = 2'-O-methyladenosine-3'-phosphate
  modified_base 5: mod_base = OTHER; note = 2'-O-methylcytidine-3'-phosphate
  modified_base 6: mod_base = OTHER; note = 2'-deoxy-2'-fluoroguanosine-3'-phosphate
  modified_base 7: mod_base = OTHER; note = 2'-O-methyladenosine-3'-phosphate
  modified_base 8: mod_base = OTHER; note = 2'-deoxy-2'-fluoroguanosine-3'-phosphate
  modified_base 9: mod_base = OTHER; note = 2'-deoxy-2'-fluorouridine-3'-phosphate
  modified_base 10: mod_base = OTHER; note = 2'-O-methylcytidine-3'-phosphate
  modified_base 11: mod_base = OTHER; note = 2'-O-methyluridine-3'-phosphate
  modified_base 12: mod_base = OTHER; note = 2'-O-methylcytidine-3'-phosphate
  modified_base 13: mod_base = OTHER; note = 2'-O-methyluridine-3'-phosphate
  modified_base 14: mod_base = OTHER; note = 2'-deoxy-2'-fluorouridine-3'-phosphate
  modified_base 15: mod_base = OTHER; note = 2'-O-methylcytidine-3'-phosphate
  modified_base 16: mod_base = OTHER; note = 2'-deoxy-2'-fluorouridine-3'-phosphate
  modified_base 17: mod_base = OTHER; note = 2'-O-methylguanosine-3'-phosphate
  modified_base 18: mod_base = OTHER; note = 2'-O-methyladenosine-3'-phosphate
  modified_base 19: mod_base = OTHER; note = 2'-O-methylcytidine-3'-phosphate
  modified_base 20: mod_base = OTHER; note = 2'-O-methyluridine-3'-phosphate
  modified_base 21: mod_base = OTHER; note = 2'-O-methylguanosine-3'-phosphorothioate
  modified_base 22: mod_base = OTHER; note = 2'-O-methylcytidine-3'-phosphorothioate
  modified_base 23: mod_base = OTHER; note = 2'-O-methyladenosine
aacacgagtctcttctgactgca

SEQ ID NO: 5956 - RNA, 23 nt, synthetic construct
  source 1..23: mol_type = other RNA
  modified_base 1: mod_base = OTHER; note = 2'-O-methyladenosine-3'-phosphorothioate
  modified_base 2: mod_base = OTHER; note = 2'-deoxy-2'-fluoroadenosine-3'-phosphorothioate
  modified_base 3: mod_base = OTHER; note = 2'-O-methyluridine-3'-phosphate
  modified_base 4: mod_base = OTHER; note = 2'-O-methylguanosine-3'-phosphate
  modified_base 5: mod_base = OTHER; note = 2'-O-methyladenosine-3'-phosphate
  modified_base 6: mod_base = OTHER; note = 2'-deoxy-2'-fluoroadenosine-3'-phosphate
  modified_base 7: mod_base = OTHER; note = 2'-O-methyladenosine-3'-phosphate
  modified_base 8: mod_base = OTHER; note = 2'-deoxy-2'-fluoroadenosine-3'-phosphate
  modified_base 9: mod_base = OTHER; note = 2'-deoxy-2'-fluorouridine-3'-phosphate
  modified_base 10: mod_base = OTHER; note = 2'-O-methylguanosine-3'-phosphate
  modified_base 11: mod_base = OTHER; note = 2'-O-methyladenosine-3'-phosphate
  modified_base 12: mod_base = OTHER; note = 2'-O-methyladenosine-3'-phosphate
  modified_base 13: mod_base = OTHER; note = 2'-O-methylcytidine-3'-phosphate
  modified_base 14: mod_base = OTHER; note = 2'-deoxy-2'-fluoroadenosine-3'-phosphate
  modified_base 15: mod_base = OTHER; note = 2'-O-methyluridine-3'-phosphate
  modified_base 16: mod_base = OTHER; note = 2'-deoxy-2'-fluorouridine-3'-phosphate
  modified_base 17: mod_base = OTHER; note = 2'-O-methylcytidine-3'-phosphate
  modified_base 18: mod_base = OTHER; note = 2'-O-methyluridine-3'-phosphate
  modified_base 19: mod_base = OTHER; note = 2'-O-methylguanosine-3'-phosphate
  modified_base 20: mod_base = OTHER; note = 2'-O-methylcytidine-3'-phosphate
  modified_base 21: mod_base = OTHER; note = 2'-O-methylcytidine-3'-phosphorothioate
  modified_base 22: mod_base = OTHER; note = 2'-O-methyladenosine-3'-phosphorothioate
  modified_base 23: mod_base = OTHER; note = 2'-O-methylcytidine
aatgaaaatgaacattctgccac

SEQ ID NO: 5957 - RNA, 23 nt, synthetic construct
  source 1..23: mol_type = other RNA
  modified_base 1: mod_base = OTHER; note = 2'-O-methyladenosine-3'-phosphorothioate
  modified_base 2: mod_base = OTHER; note = 2'-deoxy-2'-fluoroguanosine-3'-phosphorothioate
  modified_base 3: mod_base = OTHER; note = 2'-O-methylcytidine-3'-phosphate
  modified_base 4: mod_base = OTHER; note = 2'-O-methyluridine-3'-phosphate
  modified_base 5: mod_base = OTHER; note = 2'-O-methyluridine-3'-phosphate
  modified_base 6: mod_base = OTHER; note = 2'-deoxy-2'-fluoroguanosine-3'-phosphate
  modified_base 7: mod_base = OTHER; note = 2'-O-methyladenosine-3'-phosphate
  modified_base 8: mod_base = OTHER; note = 2'-deoxy-2'-fluorouridine-3'-phosphate
  modified_base 9: mod_base = OTHER; note = 2'-deoxy-2'-fluoroguanosine-3'-phosphate
  modified_base 10: mod_base = OTHER; note = 2'-O-methylguanosine-3'-phosphate
  modified_base 11: mod_base = OTHER; note = 2'-O-methylguanosine-3'-phosphate
  modified_base 12: mod_base = OTHER; note = 2'-O-methyluridine-3'-phosphate
  modified_base 13: mod_base = OTHER; note = 2'-O-methyladenosine-3'-phosphate
  modified_base 14: mod_base = OTHER; note = 2'-deoxy-2'-fluorocytidine-3'-phosphate
  modified_base 15: mod_base = OTHER; note = 2'-O-methyluridine-3'-phosphate
  modified_base 16: mod_base = OTHER; note = 2'-deoxy-2'-fluoroguanosine-3'-phosphate
  modified_base 17: mod_base = OTHER; note = 2'-O-methyluridine-3'-phosphate
  modified_base 18: mod_base = OTHER; note = 2'-O-methyluridine-3'-phosphate
  modified_base 19: mod_base = OTHER; note = 2'-O-methylguanosine-3'-phosphate
  modified_base 20: mod_base = OTHER; note = 2'-O-methylguanosine-3'-phosphate
  modified_base 21: mod_base = OTHER; note = 2'-O-methyluridine-3'-phosphorothioate
  modified_base 22: mod_base = OTHER; note = 2'-O-methylguanosine-3'-phosphorothioate
  modified_base 23: mod_base = OTHER; note = 2'-O-methyladenosine
agcttgatgggtactgttggtga

SEQ ID NO: 5958 - RNA, 23 nt, synthetic construct
  source 1..23: mol_type = other RNA
  modified_base 1: mod_base = OTHER; note = 2'-O-methyladenosine-3'-phosphorothioate
  modified_base 2: mod_base = OTHER; note = 2'-deoxy-2'-fluoroguanosine-3'-phosphorothioate
  modified_base 3: mod_base = OTHER; note = 2'-O-methyladenosine-3'-phosphate
  modified_base 4: mod_base = OTHER; note = 2'-O-methylguanosine-3'-phosphate
  modified_base 5: mod_base = OTHER; note = 2'-O-methyladenosine-3'-phosphate
  modified_base 6: mod_base = OTHER; note = 2'-deoxy-2'-fluoroadenosine-3'-phosphate
  modified_base 7: mod_base = OTHER; note = 2'-O-methylguanosine-3'-phosphate
  modified_base 8: mod_base = OTHER; note = 2'-deoxy-2'-fluorouridine-3'-phosphate
  modified_base 9: mod_base = OTHER; note = 2'-deoxy-2'-fluorouridine-3'-phosphate
  modified_base 10: mod_base = OTHER; note = 2'-O-methyluridine-3'-phosphate
  modified_base 11: mod_base = OTHER; note = 2'-O-methyluridine-3'-phosphate
  modified_base 12: mod_base = OTHER; note = 2'-O-methylcytidine-3'-phosphate
  modified_base 13: mod_base = OTHER; note = 2'-O-methyluridine-3'-phosphate
  modified_base 14: mod_base = OTHER; note = 2'-deoxy-2'-fluorouridine-3'-phosphate
  modified_base 15: mod_base = OTHER; note = 2'-O-methyluridine-3'-phosphate
  modified_base 16: mod_base = OTHER; note = 2'-deoxy-2'-fluorocytidine-3'-phosphate
  modified_base 17: mod_base = OTHER; note = 2'-O-methylcytidine-3'-phosphate
  modified_base 18: mod_base = OTHER; note = 2'-O-methylcytidine-3'-phosphate
  modified_base 19: mod_base = OTHER; note = 2'-O-methyladenosine-3'-phosphate
  modified_base 20: mod_base = OTHER; note = 2'-O-methyluridine-3'-phosphate
  modified_base 21: mod_base = OTHER; note = 2'-O-methyluridine-3'-phosphorothioate
  modified_base 22: mod_base = OTHER; note = 2'-O-methyluridine-3'-phosphorothioate
  modified_base 23: mod_base = OTHER; note = 2'-O-methylguanosine
agagaagttttctttcccatttg

SEQ ID NO: 5959 - RNA, 23 nt, synthetic construct
  source 1..23: mol_type = other RNA
  modified_base 1: mod_base = OTHER; note = 2'-O-methyladenosine-3'-phosphorothioate
  modified_base 2: mod_base = OTHER; note = 2'-deoxy-2'-fluoroguanosine-3'-phosphorothioate
  modified_base 3: mod_base = OTHER; note = 2'-O-methyladenosine-3'-phosphate
  modified_base 4: mod_base = OTHER; note = 2'-O-methyluridine-3'-phosphate
  modified_base 5: mod_base = OTHER; note = 2'-O-methylguanosine-3'-phosphate
  modified_base 6: mod_base = OTHER; note = 2'-deoxy-2'-fluorouridine-3'-phosphate
  modified_base 7: mod_base = OTHER; note = 2'-O-methyluridine-3'-phosphate
  modified_base 8: mod_base = OTHER; note = 2'-deoxy-2'-fluorouridine-3'-phosphate
  modified_base 9: mod_base = OTHER; note = 2'-deoxy-2'-fluorouridine-3'-phosphate
  modified_base 10: mod_base = OTHER; note = 2'-O-methylguanosine-3'-phosphate
  modified_base 11: mod_base = OTHER; note = 2'-O-methylcytidine-3'-phosphate
  modified_base 12: mod_base = OTHER; note = 2'-O-methylcytidine-3'-phosphate
  modified_base 13: mod_base = OTHER; note = 2'-O-methyladenosine-3'-phosphate
  modified_base 14: mod_base = OTHER; note = 2'-deoxy-2'-fluorocytidine-3'-phosphate
  modified_base 15: mod_base = OTHER; note = 2'-O-methyladenosine-3'-phosphate
  modified_base 16: mod_base = OTHER; note = 2'-deoxy-2'-fluoroadenosine-3'-phosphate
  modified_base 17: mod_base = OTHER; note = 2'-O-methyladenosine-3'-phosphate
  modified_base 18: mod_base = OTHER; note = 2'-O-methylguanosine-3'-phosphate
  modified_base 19: mod_base = OTHER; note = 2'-O-methyladenosine-3'-phosphate
  modified_base 20: mod_base = OTHER; note = 2'-O-methylguanosine-3'-phosphate
  modified_base 21: mod_base = OTHER; note = 2'-O-methylguanosine-3'-phosphorothioate
  modified_base 22: mod_base = OTHER; note = 2'-O-methyluridine-3'-phosphorothioate
  modified_base 23: mod_base = OTHER; note = 2'-O-methylguanosine
agatgttttgccacaaagaggtg

SEQ ID NO: 5960 - RNA, 23 nt, synthetic construct
  source 1..23: mol_type = other RNA
  modified_base 1: mod_base = OTHER; note = 2'-O-methyladenosine-3'-phosphorothioate
  modified_base 2: mod_base = OTHER; note = 2'-deoxy-2'-fluoroadenosine-3'-phosphorothioate
  modified_base 3: mod_base = OTHER; note = 2'-O-methyladenosine-3'-phosphate
  modified_base 4: mod_base = OTHER; note = 2'-O-methyluridine-3'-phosphate
  modified_base 5: mod_base = OTHER; note = 2'-O-methylguanosine-3'-phosphate
  modified_base 6: mod_base = OTHER; note = 2'-deoxy-2'-fluoroguanosine-3'-phosphate
  modified_base 7: mod_base = OTHER; note = 2'-O-methyluridine-3'-phosphate
  modified_base 8: mod_base = OTHER; note = 2'-deoxy-2'-fluorouridine-3'-phosphate
  modified_base 9: mod_base = OTHER; note = 2'-deoxy-2'-fluorouridine-3'-phosphate
  modified_base 10: mod_base = OTHER; note = 2'-O-methyluridine-3'-phosphate
  modified_base 11: mod_base = OTHER; note = 2'-O-methylcytidine-3'-phosphate
  modified_base 12: mod_base = OTHER; note = 2'-O-methyladenosine-3'-phosphate
  modified_base 13: mod_base = OTHER; note = 2'-O-methylguanosine-3'-phosphate
  modified_base 14: mod_base = OTHER; note = 2'-deoxy-2'-fluoroguanosine-3'-phosphate
  modified_base 15: mod_base = OTHER; note = 2'-O-methylcytidine-3'-phosphate
  modified_base 16: mod_base = OTHER; note = 2'-deoxy-2'-fluorocytidine-3'-phosphate
  modified_base 17: mod_base = OTHER; note = 2'-O-methyluridine-3'-phosphate
  modified_base 18: mod_base = OTHER; note = 2'-O-methyluridine-3'-phosphate
  modified_base 19: mod_base = OTHER; note = 2'-O-methyladenosine-3'-phosphate
  modified_base 20: mod_base = OTHER; note = 2'-O-methylguanosine-3'-phosphate
  modified_base 21: mod_base = OTHER; note = 2'-O-methyladenosine-3'-phosphorothioate
  modified_base 22: mod_base = OTHER; note = 2'-O-methyluridine-3'-phosphorothioate
  modified_base 23: mod_base = OTHER; note = 2'-O-methylguanosine
aaatggttttcaggccttagatg

SEQ ID NO: 5961 - RNA, 23 nt, synthetic construct
  source 1..23: mol_type = other RNA
  modified_base 1: mod_base = OTHER; note = 2'-O-methyladenosine-3'-phosphorothioate
  modified_base 2: mod_base = OTHER; note = 2'-deoxy-2'-fluorocytidine-3'-phosphorothioate
  modified_base 3: mod_base = OTHER; note = 2'-O-methyluridine-3'-phosphate
  modified_base 4: mod_base = OTHER; note = 2'-O-methylguanosine-3'-phosphate
  modified_base 5: mod_base = OTHER; note = 2'-O-methyluridine-3'-phosphate
  modified_base 6: mod_base = OTHER; note = 2'-deoxy-2'-fluorouridine-3'-phosphate
  modified_base 7: mod_base = OTHER; note = 2'-O-methylguanosine-3'-phosphate
  modified_base 8: mod_base = OTHER; note = 2'-deoxy-2'-fluoroadenosine-3'-phosphate
  modified_base 9: mod_base = OTHER; note = 2'-deoxy-2'-fluoroadenosine-3'-phosphate
  modified_base 10: mod_base = OTHER; note = 2'-O-methyladenosine-3'-phosphate
  modified_base 11: mod_base = OTHER; note = 2'-O-methyluridine-3'-phosphate
  modified_base 12: mod_base = OTHER; note = 2'-O-methyluridine-3'-phosphate
  modified_base 13: mod_base = OTHER; note = 2'-O-methyluridine-3'-phosphate
  modified_base 14: mod_base = OTHER; note = 2'-deoxy-2'-fluoroadenosine-3'-phosphate
  modified_base 15: mod_base = OTHER; note = 2'-O-methylguanosine-3'-phosphate
  modified_base 16: mod_base = OTHER; note = 2'-deoxy-2'-fluoroadenosine-3'-phosphate
  modified_base 17: mod_base = OTHER; note = 2'-O-methyladenosine-3'-phosphate
  modified_base 18: mod_base = OTHER; note = 2'-O-methylguanosine-3'-phosphate
  modified_base 19: mod_base = OTHER; note = 2'-O-methyladenosine-3'-phosphate
  modified_base 20: mod_base = OTHER; note = 2'-O-methylcytidine-3'-phosphate
  modified_base 21: mod_base = OTHER; note = 2'-O-methylcytidine-3'-phosphorothioate
  modified_base 22: mod_base = OTHER; note = 2'-O-methylcytidine-3'-phosphorothioate
  modified_base 23: mod_base = OTHER; note = 2'-O-methyladenosine
actgttgaaatttagaagaccca

SEQ ID NO: 5962 - RNA, 23 nt, synthetic construct
  source 1..23: mol_type = other RNA
  modified_base 1: mod_base = OTHER; note = 2'-O-methyladenosine-3'-phosphorothioate
  modified_base 2: mod_base = OTHER; note = 2'-deoxy-2'-fluoroguanosine-3'-phosphorothioate
  modified_base 3: mod_base = OTHER; note = 2'-O-methyladenosine-3'-phosphate
  modified_base 4: mod_base = OTHER; note = 2'-O-methyladenosine-3'-phosphate
  modified_base 5: mod_base = OTHER; note = 2'-O-methylcytidine-3'-phosphate
  modified_base 6: mod_base = OTHER; note = 2'-deoxy-2'-fluoroadenosine-3'-phosphate
  modified_base 7: mod_base = OTHER; note = 2'-O-methylguanosine-3'-phosphate
  modified_base 8: mod_base = OTHER; note = 2'-deoxy-2'-fluoroadenosine-3'-phosphate
  modified_base 9: mod_base = OTHER; note = 2'-deoxy-2'-fluoroguanosine-3'-phosphate
  modified_base 10: mod_base = OTHER; note = 2'-O-methyladenosine-3'-phosphate
  modified_base 11: mod_base = OTHER; note = 2'-O-methyladenosine-3'-phosphate
  modified_base 12: mod_base = OTHER; note = 2'-O-methyluridine-3'-phosphate
  modified_base 13: mod_base = OTHER; note = 2'-O-methylguanosine-3'-phosphate
  modified_base 14: mod_base = OTHER; note = 2'-deoxy-2'-fluorocytidine-3'-phosphate
  modified_base 15: mod_base = OTHER; note = 2'-O-methyladenosine-3'-phosphate
  modified_base 16: mod_base = OTHER; note = 2'-deoxy-2'-fluoroguanosine-3'-phosphate
  modified_base 17: mod_base = OTHER; note = 2'-O-methyladenosine-3'-phosphate
  modified_base 18: mod_base = OTHER; note = 2'-O-methyladenosine-3'-phosphate
  modified_base 19: mod_base = OTHER; note = 2'-O-methylguanosine-3'-phosphate
  modified_base 20: mod_base = OTHER; note = 2'-O-methyluridine-3'-phosphate
  modified_base 21: mod_base = OTHER; note = 2'-O-methylguanosine-3'-phosphorothioate
  modified_base 22: mod_base = OTHER; note = 2'-O-methylguanosine-3'-phosphorothioate
  modified_base 23: mod_base = OTHER; note = 2'-O-methylcytidine
agaacagagaatgcagaagtggc

SEQ ID NO: 5963 - RNA, 23 nt, synthetic construct
  source 1..23: mol_type = other RNA
  modified_base 1: mod_base = OTHER; note = 2'-O-methyladenosine-3'-phosphorothioate
  modified_base 2: mod_base = OTHER; note = 2'-deoxy-2'-fluorocytidine-3'-phosphorothioate
  modified_base 3: mod_base = OTHER; note = 2'-O-methyladenosine-3'-phosphate
  modified_base 4: mod_base = OTHER; note = 2'-O-methylguanosine-3'-phosphate
  modified_base 5: mod_base = OTHER; note = 2'-O-methyladenosine-3'-phosphate
  modified_base 6: mod_base = OTHER; note = 2'-deoxy-2'-fluoroadenosine-3'-phosphate
  modified_base 7: mod_base = OTHER; note = 2'-O-methyladenosine-3'-phosphate
  modified_base 8: mod_base = OTHER; note = 2'-deoxy-2'-fluorocytidine-3'-phosphate
  modified_base 9: mod_base = OTHER; note = 2'-deoxy-2'-fluoroadenosine-3'-phosphate
  modified_base 10: mod_base = OTHER; note = 2'-O-methyluridine-3'-phosphate
  modified_base 11: mod_base = OTHER; note = 2'-O-methylguanosine-3'-phosphate
  modified_base 12: mod_base = OTHER; note = 2'-O-methylcytidine-3'-phosphate
  modified_base 13: mod_base = OTHER; note = 2'-O-methyladenosine-3'-phosphate
  modified_base 14: mod_base = OTHER; note = 2'-deoxy-2'-fluorouridine-3'-phosphate
  modified_base 15: mod_base = OTHER; note = 2'-O-methylguanosine-3'-phosphate
  modified_base 16: mod_base = OTHER; note = 2'-deoxy-2'-fluoroadenosine-3'-phosphate
  modified_base 17: mod_base = OTHER; note = 2'-O-methyladenosine-3'-phosphate
  modified_base 18: mod_base = OTHER; note = 2'-O-methylguanosine-3'-phosphate
  modified_base 19: mod_base = OTHER; note = 2'-O-methyladenosine-3'-phosphate
  modified_base 20: mod_base = OTHER; note = 2'-O-methylguanosine-3'-phosphate
  modified_base 21: mod_base = OTHER; note = 2'-O-methylguanosine-3'-phosphorothioate
  modified_base 22: mod_base = OTHER; note = 2'-O-methyladenosine-3'-phosphorothioate
  modified_base 23: mod_base = OTHER; note = 2'-O-methylguanosine
acagaaacatgcatgaagaggag

SEQ ID NO: 5964 - RNA, 23 nt, synthetic construct
  source 1..23: mol_type = other RNA
  modified_base 1: mod_base = OTHER; note = 2'-O-methyladenosine-3'-phosphorothioate
  modified_base 2: mod_base = OTHER; note = 2'-deoxy-2'-fluoroadenosine-3'-phosphorothioate
  modified_base 3: mod_base = OTHER; note = 2'-O-methylcytidine-3'-phosphate
  modified_base 4: mod_base = OTHER; note = 2'-O-methyladenosine-3'-phosphate
  modified_base 5: mod_base = OTHER; note = 2'-O-methyluridine-3'-phosphate
  modified_base 6: mod_base = OTHER; note = 2'-deoxy-2'-fluoroadenosine-3'-phosphate
  modified_base 7: mod_base = OTHER; note = 2'-O-methyluridine-3'-phosphate
  modified_base 8: mod_base = OTHER; note = 2'-deoxy-2'-fluoroguanosine-3'-phosphate
  modified_base 9: mod_base = OTHER; note = 2'-deoxy-2'-fluorocytidine-3'-phosphate
  modified_base 10: mod_base = OTHER; note = 2'-O-methyladenosine-3'-phosphate
  modified_base 11: mod_base = OTHER; note = 2'-O-methyluridine-3'-phosphate
  modified_base 12: mod_base = OTHER; note = 2'-O-methyluridine-3'-phosphate
  modified_base 13: mod_base = OTHER; note = 2'-O-methyladenosine-3'-phosphate
  modified_base 14: mod_base = OTHER; note = 2'-deoxy-2'-fluorocytidine-3'-phosphate
  modified_base 15: mod_base = OTHER; note = 2'-O-methyladenosine-3'-phosphate
  modified_base 16: mod_base = OTHER; note = 2'-deoxy-2'-fluorouridine-3'-phosphate
  modified_base 17: mod_base = OTHER; note = 2'-O-methylguanosine-3'-phosphate
  modified_base 18: mod_base = OTHER; note = 2'-O-methyluridine-3'-phosphate
  modified_base 19: mod_base = OTHER; note = 2'-O-methyladenosine-3'-phosphate
  modified_base 20: mod_base = OTHER; note = 2'-O-methylguanosine-3'-phosphate
  modified_base 21: mod_base = OTHER; note = 2'-O-methylguanosine-3'-phosphorothioate
  modified_base 22: mod_base = OTHER; note = 2'-O-methyladenosine-3'-phosphorothioate
  modified_base 23: mod_base = OTHER; note = 2'-O-methylcytidine
aacatatgcattacatgtaggac

SEQ ID NO: 5965 - RNA, 23 nt, synthetic construct
  source 1..23: mol_type = other RNA
  modified_base 1: mod_base = OTHER; note = 2'-O-methyladenosine-3'-phosphorothioate
  modified_base 2: mod_base = OTHER; note = 2'-deoxy-2'-fluoroguanosine-3'-phosphorothioate
  modified_base 3: mod_base = OTHER; note = 2'-O-methyladenosine-3'-phosphate
  modified_base 4: mod_base = OTHER; note = 2'-O-methyluridine-3'-phosphate
  modified_base 5: mod_base = OTHER; note = 2'-O-methyladenosine-3'-phosphate
  modified_base 6: mod_base = OTHER; note = 2'-deoxy-2'-fluoroadenosine-3'-phosphate
  modified_base 7: mod_base = OTHER; note = 2'-O-methylguanosine-3'-phosphate
  modified_base 8: mod_base = OTHER; note = 2'-deoxy-2'-fluoroadenosine-3'-phosphate
  modified_base 9: mod_base = OTHER; note = 2'-deoxy-2'-fluorouridine-3'-phosphate
  modified_base 10: mod_base = OTHER; note = 2'-O-methylguanosine-3'-phosphate
  modified_base 11: mod_base = OTHER; note = 2'-O-methyladenosine-3'-phosphate
  modified_base 12: mod_base = OTHER; note = 2'-O-methyluridine-3'-phosphate
  modified_base 13: mod_base = OTHER; note = 2'-O-methylguanosine-3'-phosphate
  modified_base 14: mod_base = OTHER; note = 2'-deoxy-2'-fluorocytidine-3'-phosphate
  modified_base 15: mod_base = OTHER; note = 2'-O-methyladenosine-3'-phosphate
  modified_base 16: mod_base = OTHER; note = 2'-deoxy-2'-fluorouridine-3'-phosphate
  modified_base 17: mod_base = OTHER; note = 2'-O-methylcytidine-3'-phosphate
  modified_base 18: mod_base = OTHER; note = 2'-O-methyladenosine-3'-phosphate
  modified_base 19: mod_base = OTHER; note = 2'-O-methylcytidine-3'-phosphate
  modified_base 20: mod_base = OTHER; note = 2'-O-methyladenosine-3'-phosphate
  modified_base 21: mod_base = OTHER; note = 2'-O-methyluridine-3'-phosphorothioate
  modified_base 22: mod_base = OTHER; note = 2'-O-methyladenosine-3'-phosphorothioate
  modified_base 23: mod_base = OTHER; note = 2'-O-methyluridine
agataagatgatgcatcacatat

SEQ ID NO: 5966 - RNA, 23 nt, synthetic construct
  source 1..23: mol_type = other RNA
  modified_base 1: mod_base = OTHER; note = 2'-O-methyladenosine-3'-phosphorothioate
  modified_base 2: mod_base = OTHER; note = 2'-deoxy-2'-fluoroadenosine-3'-phosphorothioate
  modified_base 3: mod_base = OTHER; note = 2'-O-methyluridine-3'-phosphate
  modified_base 4: mod_base = OTHER; note = 2'-O-methyladenosine-3'-phosphate
  modified_base 5: mod_base = OTHER; note = 2'-O-methylguanosine-3'-phosphate
  modified_base 6: mod_base = OTHER; note = 2'-deoxy-2'-fluoroguanosine-3'-phosphate
  modified_base 7: mod_base = OTHER; note = 2'-O-methyladenosine-3'-phosphate
  modified_base 8: mod_base = OTHER; note = 2'-deoxy-2'-fluoroadenosine-3'-phosphate
  modified_base 9: mod_base = OTHER; note = 2'-deoxy-2'-fluoroguanosine-3'-phosphate
  modified_base 10: mod_base = OTHER; note = 2'-O-methylguanosine-3'-phosphate
  modified_base 11: mod_base = OTHER; note = 2'-O-methyladenosine-3'-phosphate
  modified_base 12: mod_base = OTHER; note = 2'-O-methyladenosine-3'-phosphate
  modified_base 13: mod_base = OTHER; note = 2'-O-methyluridine-3'-phosphate
  modified_base 14: mod_base = OTHER; note = 2'-deoxy-2'-fluoroadenosine-3'-phosphate
  modified_base 15: mod_base = OTHER; note = 2'-O-methyluridine-3'-phosphate
  modified_base 16: mod_base = OTHER; note = 2'-deoxy-2'-fluoroadenosine-3'-phosphate
  modified_base 17: mod_base = OTHER; note = 2'-O-methyluridine-3'-phosphate
  modified_base 18: mod_base = OTHER; note = 2'-O-methylguanosine-3'-phosphate
  modified_base 19: mod_base = OTHER; note = 2'-O-methyladenosine-3'-phosphate
  modified_base 20: mod_base = OTHER; note = 2'-O-methyluridine-3'-phosphate
  modified_base 21: mod_base = OTHER; note = 2'-O-methyladenosine-3'-phosphorothioate
  modified_base 22: mod_base = OTHER; note = 2'-O-methyladenosine-3'-phosphorothioate
  modified_base 23: mod_base = OTHER; note = 2'-O-methylguanosine
aataggaaggaatatatgataag

SEQ ID NO: 5967 - RNA, 23 nt, synthetic construct
  source 1..23: mol_type = other RNA
  modified_base 1: mod_base = OTHER; note = 2'-O-methyladenosine-3'-phosphorothioate
  modified_base 2: mod_base = OTHER; note = 2'-deoxy-2'-fluoroadenosine-3'-phosphorothioate
  modified_base 3: mod_base = OTHER; note = 2'-O-methyladenosine-3'-phosphate
  modified_base 4: mod_base = OTHER; note = 2'-O-methylguanosine-3'-phosphate
  modified_base 5: mod_base = OTHER; note = 2'-O-methyluridine-3'-phosphate
  modified_base 6: mod_base = OTHER; note = 2'-deoxy-2'-fluoroguanosine-3'-phosphate
  modified_base 7: mod_base = OTHER; note = 2'-O-methyluridine-3'-phosphate
  modified_base 8: mod_base = OTHER; note = 2'-deoxy-2'-fluoroadenosine-3'-phosphate
  modified_base 9: mod_base = OTHER; note = 2'-deoxy-2'-fluoroadenosine-3'-phosphate
  modified_base 10: mod_base = OTHER; note = 2'-O-methyladenosine-3'-phosphate
  modified_base 11: mod_base = OTHER; note = 2'-O-methylcytidine-3'-phosphate
  modified_base 12: mod_base = OTHER; note = 2'-O-methyladenosine-3'-phosphate
  modified_base 13: mod_base = OTHER; note = 2'-O-methyladenosine-3'-phosphate
  modified_base 14: mod_base = OTHER; note = 2'-deoxy-2'-fluorouridine-3'-phosphate
  modified_base 15: mod_base = OTHER; note = 2'-O-methylguanosine-3'-phosphate
  modified_base 16: mod_base = OTHER; note = 2'-deoxy-2'-fluorouridine-3'-phosphate
  modified_base 17: mod_base = OTHER; note = 2'-O-methyladenosine-3'-phosphate
  modified_base 18: mod_base = OTHER; note = 2'-O-methyluridine-3'-phosphate
  modified_base 19: mod_base = OTHER; note = 2'-O-methyladenosine-3'-phosphate
  modified_base 20: mod_base = OTHER; note = 2'-O-methylguanosine-3'-phosphate
  modified_base 21: mod_base = OTHER; note = 2'-O-methylguanosine-3'-phosphorothioate
  modified_base 22: mod_base = OTHER; note = 2'-O-methyladenosine-3'-phosphorothioate
  modified_base 23: mod_base = OTHER; note = 2'-O-methyladenosine
aaagtgtaaacaatgtataggaa

SEQ ID NO: 5968 - RNA, 23 nt, synthetic construct
  source 1..23: mol_type = other RNA
  modified_base 1: mod_base = OTHER; note = 2'-O-methyladenosine-3'-phosphorothioate
  modified_base 2: mod_base = OTHER; note = 2'-deoxy-2'-fluoroadenosine-3'-phosphorothioate
  modified_base 3: mod_base = OTHER; note = 2'-O-methylguanosine-3'-phosphate
  modified_base 4: mod_base = OTHER; note = 2'-O-methyluridine-3'-phosphate
  modified_base 5: mod_base = OTHER; note = 2'-O-methyladenosine-3'-phosphate
  modified_base 6: mod_base = OTHER; note = 2'-deoxy-2'-fluoroadenosine-3'-phosphate
  modified_base 7: mod_base = OTHER; note = 2'-O-methyluridine-3'-phosphate
  modified_base 8: mod_base = OTHER; note = 2'-deoxy-2'-fluorouridine-3'-phosphate
  modified_base 9: mod_base = OTHER; note = 2'-deoxy-2'-fluorouridine-3'-phosphate
  modified_base 10: mod_base = OTHER; note = 2'-O-methyladenosine-3'-phosphate
  modified_base 11: mod_base = OTHER; note = 2'-O-methyladenosine-3'-phosphate
  modified_base 12: mod_base = OTHER; note = 2'-O-methylguanosine-3'-phosphate
  modified_base 13: mod_base = OTHER; note = 2'-O-methyluridine-3'-phosphate
  modified_base 14: mod_base = OTHER; note = 2'-deoxy-2'-fluorouridine-3'-phosphate
  modified_base 15: mod_base = OTHER; note = 2'-O-methyluridine-3'-phosphate
  modified_base 16: mod_base = OTHER; note = 2'-deoxy-2'-fluoroguanosine-3'-phosphate
  modified_base 17: mod_base = OTHER; note = 2'-O-methyluridine-3'-phosphate
  modified_base 18: mod_base = OTHER; note = 2'-O-methylguanosine-3'-phosphate
  modified_base 19: mod_base = OTHER; note = 2'-O-methyluridine-3'-phosphate
  modified_base 20: mod_base = OTHER; note = 2'-O-methylguanosine-3'-phosphate
  modified_base 21: mod_base = OTHER; note = 2'-O-methylguanosine-3'-phosphorothioate
  modified_base 22: mod_base = OTHER; note = 2'-O-methyladenosine-3'-phosphorothioate
  modified_base 23: mod_base = OTHER; note = 2'-O-methyladenosine
aagtaatttaagtttgtgtggaa

SEQ ID NO: 5969 - RNA, 23 nt, synthetic construct
  source 1..23: mol_type = other RNA
  modified_base 1: mod_base = OTHER; note = 2'-O-methyladenosine-3'-phosphorothioate
  modified_base 2: mod_base = OTHER; note = 2'-deoxy-2'-fluorouridine-3'-phosphorothioate
  modified_base 3: mod_base = OTHER; note = 2'-O-methyladenosine-3'-phosphate
  modified_base 4: mod_base = OTHER; note = 2'-O-methyluridine-3'-phosphate
  modified_base 5: mod_base = OTHER; note = 2'-O-methyluridine-3'-phosphate
  modified_base 6: mod_base = OTHER; note = 2'-deoxy-2'-fluoroguanosine-3'-phosphate
  modified_base 7: mod_base = OTHER; note = 2'-O-methyluridine-3'-phosphate
  modified_base 8: mod_base = OTHER; note = 2'-deoxy-2'-fluorouridine-3'-phosphate
  modified_base 9: mod_base = OTHER; note = 2'-deoxy-2'-fluorouridine-3'-phosphate
  modified_base 10: mod_base = OTHER; note = 2'-O-methyluridine-3'-phosphate
  modified_base 11: mod_base = OTHER; note = 2'-O-methylguanosine-3'-phosphate
  modified_base 12: mod_base = OTHER; note = 2'-O-methylcytidine-3'-phosphate
  modified_base 13: mod_base = OTHER; note = 2'-O-methylcytidine-3'-phosphate
  modified_base 14: mod_base = OTHER; note = 2'-deoxy-2'-fluoroadenosine-3'-phosphate
  modified_base 15: mod_base = OTHER; note = 2'-O-methyladenosine-3'-phosphate
  modified_base 16: mod_base = OTHER; note = 2'-deoxy-2'-fluorocytidine-3'-phosphate
  modified_base 17: mod_base = OTHER; note = 2'-O-methyladenosine-3'-phosphate
  modified_base 18: mod_base = OTHER; note = 2'-O-methylguanosine-3'-phosphate
  modified_base 19: mod_base = OTHER; note = 2'-O-methyluridine-3'-phosphate
  modified_base 20: mod_base = OTHER; note = 2'-O-methyladenosine-3'-phosphate
  modified_base 21: mod_base = OTHER; note = 2'-O-methyladenosine-3'-phosphorothioate
  modified_base 22: mod_base = OTHER; note = 2'-O-methyluridine-3'-phosphorothioate
  modified_base 23: mod_base = OTHER; note = 2'-O-methyluridine
atattgttttgccaacagtaatt

SEQ ID NO: 5970 - RNA, 23 nt, synthetic construct
  source 1..23: mol_type = other RNA
  modified_base 1: mod_base = OTHER; note = 2'-O-methyladenosine-3'-phosphorothioate
  modified_base 2: mod_base = OTHER; note = 2'-deoxy-2'-fluorouridine-3'-phosphorothioate
  modified_base 3: mod_base = OTHER; note = 2'-O-methylguanosine-3'-phosphate
  modified_base 4: mod_base = OTHER; note = 2'-O-methyladenosine-3'-phosphate
  modified_base 5: mod_base = OTHER; note = 2'-O-methyluridine-3'-phosphate
  modified_base 6: mod_base = OTHER; note = 2'-deoxy-2'-fluoroguanosine-3'-phosphate
  modified_base 7: mod_base = OTHER; note = 2'-O-methyladenosine-3'-phosphate
  modified_base 8: mod_base = OTHER; note = 2'-deoxy-2'-fluoroadenosine-3'-phosphate
  modified_base 9: mod_base = OTHER; note = 2'-deoxy-2'-fluoroguanosine-3'-phosphate
  modified_base 10: mod_base = OTHER; note = 2'-O-methyladenosine-3'-phosphate
  modified_base 11: mod_base = OTHER; note = 2'-O-methylguanosine-3'-phosphate
  modified_base 12: mod_base = OTHER; note = 2'-O-methyluridine-3'-phosphate
  modified_base 13: mod_base = OTHER; note = 2'-O-methyluridine-3'-phosphate
  modified_base 14: mod_base = OTHER; note = 2'-deoxy-2'-fluoroguanosine-3'-phosphate
  modified_base 15: mod_base = OTHER; note = 2'-O-methyluridine-3'-phosphate
  modified_base 16: mod_base = OTHER; note = 2'-deoxy-2'-fluoroadenosine-3'-phosphate
  modified_base 17: mod_base = OTHER; note = 2'-O-methylcytidine-3'-phosphate
  modified_base 18: mod_base = OTHER; note = 2'-O-methyluridine-3'-phosphate
  modified_base 19: mod_base = OTHER; note = 2'-O-methyluridine-3'-phosphate
  modified_base 20: mod_base = OTHER; note = 2'-O-methylguanosine-3'-phosphate
  modified_base 21: mod_base = OTHER; note = 2'-O-methylguanosine-3'-phosphorothioate
  modified_base 22: mod_base = OTHER; note = 2'-O-methyladenosine-3'-phosphorothioate
  modified_base 23: mod_base = OTHER; note = 2'-O-methyladenosine
atgatgaagagttgtacttggaa

SEQ ID NO: 5971 - RNA, 23 nt, synthetic construct
  source 1..23: mol_type = other RNA
  modified_base 1: mod_base = OTHER; note = 2'-O-methyladenosine-3'-phosphorothioate
  modified_base 2: mod_base = OTHER; note = 2'-deoxy-2'-fluoroadenosine-3'-phosphorothioate
  modified_base 3: mod_base = OTHER; note = 2'-O-methyluridine-3'-phosphate
  modified_base 4: mod_base = OTHER; note = 2'-O-methyluridine-3'-phosphate
  modified_base 5: mod_base = OTHER; note = 2'-O-methyladenosine-3'-phosphate
  modified_base 6: mod_base = OTHER; note = 2'-deoxy-2'-fluoroadenosine-3'-phosphate
  modified_base 7: mod_base = OTHER; note = 2'-O-methylcytidine-3'-phosphate
  modified_base 8: mod_base = OTHER; note = 2'-deoxy-2'-fluoroadenosine-3'-phosphate
  modified_base 9: mod_base = OTHER; note = 2'-deoxy-2'-fluoroguanosine-3'-phosphate
  modified_base 10: mod_base = OTHER; note = 2'-O-methyladenosine-3'-phosphate
  modified_base 11: mod_base = OTHER; note = 2'-O-methylguanosine-3'-phosphate
  modified_base 12: mod_base = OTHER; note = 2'-O-methyladenosine-3'-phosphate
  modified_base 13: mod_base = OTHER; note = 2'-O-methyladenosine-3'-phosphate
  modified_base 14: mod_base = OTHER; note = 2'-deoxy-2'-fluoroadenosine-3'-phosphate
  modified_base 15: mod_base = OTHER; note = 2'-O-methylcytidine-3'-phosphate
  modified_base 16: mod_base = OTHER; note = 2'-deoxy-2'-fluorouridine-3'-phosphate
  modified_base 17: mod_base = OTHER; note = 2'-O-methyluridine-3'-phosphate
  modified_base 18: mod_base = OTHER; note = 2'-O-methylguanosine-3'-phosphate
  modified_base 19: mod_base = OTHER; note = 2'-O-methyladenosine-3'-phosphate
  modified_base 20: mod_base = OTHER; note = 2'-O-methyluridine-3'-phosphate
  modified_base 21: mod_base = OTHER; note = 2'-O-methylguanosine-3'-phosphorothioate
  modified_base 22: mod_base = OTHER; note = 2'-O-methyladenosine-3'-phosphorothioate
  modified_base 23: mod_base = OTHER; note = 2'-O-methyladenosine
aattaacagagaaacttgatgaa

SEQ ID NO: 5972 - RNA, 23 nt, synthetic construct
  source 1..23: mol_type = other RNA
  modified_base 1: mod_base = OTHER; note = 2'-O-methyladenosine-3'-phosphorothioate
  modified_base 2: mod_base = OTHER; note = 2'-deoxy-2'-fluoroadenosine-3'-phosphorothioate
  modified_base 3: mod_base = OTHER; note = 2'-O-methyladenosine-3'-phosphate
  modified_base 4: mod_base = OTHER; note = 2'-O-methylcytidine-3'-phosphate
  modified_base 5: mod_base = OTHER; note = 2'-O-methyladenosine-3'-phosphate
  modified_base 6: mod_base = OTHER; note = 2'-deoxy-2'-fluoroadenosine-3'-phosphate
  modified_base 7: mod_base = OTHER; note = 2'-O-methyluridine-3'-phosphate
  modified_base 8: mod_base = OTHER; note = 2'-deoxy-2'-fluoroadenosine-3'-phosphate
  modified_base 9: mod_base = OTHER; note = 2'-deoxy-2'-fluoroguanosine-3'-phosphate
  modified_base 10: mod_base = OTHER; note = 2'-O-methyluridine-3'-phosphate
  modified_base 11: mod_base = OTHER; note = 2'-O-methyluridine-3'-phosphate
  modified_base 12: mod_base = OTHER; note = 2'-O-methylcytidine-3'-phosphate
  modified_base 13: mod_base = OTHER; note = 2'-O-methyluridine-3'-phosphate
  modified_base 14: mod_base = OTHER; note = 2'-deoxy-2'-fluorouridine-3'-phosphate
  modified_base 15: mod_base = OTHER; note = 2'-O-methyladenosine-3'-phosphate
  modified_base 16: mod_base = OTHER; note = 2'-deoxy-2'-fluoroadenosine-3'-phosphate
  modified_base 17: mod_base = OTHER; note = 2'-O-methylguanosine-3'-phosphate
  modified_base 18: mod_base = OTHER; note = 2'-O-methyluridine-3'-phosphate
  modified_base 19: mod_base = OTHER; note = 2'-O-methylcytidine-3'-phosphate
  modified_base 20: mod_base = OTHER; note = 2'-O-methyluridine-3'-phosphate
  modified_base 21: mod_base = OTHER; note = 2'-O-methylguanosine-3'-phosphorothioate
  modified_base 22: mod_base = OTHER; note = 2'-O-methyluridine-3'-phosphorothioate
  modified_base 23: mod_base = OTHER; note = 2'-O-methyluridine
aaacaatagttcttaagtctgtt

SEQ ID NO: 5973 - RNA, 23 nt, synthetic construct
  source 1..23: mol_type = other RNA
  modified_base 1: mod_base = OTHER; note = 2'-O-methyladenosine-3'-phosphorothioate
  modified_base 2: mod_base = OTHER; note = 2'-deoxy-2'-fluorouridine-3'-phosphorothioate
  modified_base 3: mod_base = OTHER; note = 2'-O-methyladenosine-3'-phosphate
  modified_base 4: mod_base = OTHER; note = 2'-O-methylcytidine-3'-phosphate
  modified_base 5: mod_base = OTHER; note = 2'-O-methyladenosine-3'-phosphate
  modified_base 6: mod_base = OTHER; note = 2'-deoxy-2'-fluoroadenosine-3'-phosphate
  modified_base 7: mod_base = OTHER; note = 2'-O-methylcytidine-3'-phosphate
  modified_base 8: mod_base = OTHER; note = 2'-deoxy-2'-fluorouridine-3'-phosphate
  modified_base 9: mod_base = OTHER; note = 2'-deoxy-2'-fluoroguanosine-3'-phosphate
  modified_base 10: mod_base = OTHER; note = 2'-O-methyluridine-3'-phosphate
  modified_base 11: mod_base = OTHER; note = 2'-O-methylcytidine-3'-phosphate
  modified_base 12: mod_base = OTHER; note = 2'-O-methyladenosine-3'-phosphate
  modified_base 13: mod_base = OTHER; note = 2'-O-methyluridine-3'-phosphate
  modified_base 14: mod_base = OTHER; note = 2'-deoxy-2'-fluorouridine-3'-phosphate
  modified_base 15: mod_base = OTHER; note = 2'-O-methylcytidine-3'-phosphate
  modified_base 16: mod_base = OTHER; note = 2'-deoxy-2'-fluoroadenosine-3'-phosphate
  modified_base 17: mod_base = OTHER; note = 2'-O-methylguanosine-3'-phosphate
  modified_base 18: mod_base = OTHER; note = 2'-O-methyladenosine-3'-phosphate
  modified_base 19: mod_base = OTHER; note = 2'-O-methylguanosine-3'-phosphate
  modified_base 20: mod_base = OTHER; note = 2'-O-methyladenosine-3'-phosphate
  modified_base 21: mod_base = OTHER; note = 2'-O-methyladenosine-3'-phosphorothioate
  modified_base 22: mod_base = OTHER; note = 2'-O-methylcytidine-3'-phosphorothioate
  modified_base 23: mod_base = OTHER; note = 2'-O-methyladenosine
atacaactgtcattcagagaaca

SEQ ID NO: 5974 - RNA, 23 nt, synthetic construct
  source 1..23: mol_type = other RNA
  modified_base 1: mod_base = OTHER; note = 2'-O-methyladenosine-3'-phosphorothioate
  modified_base 2: mod_base = OTHER; note = 2'-deoxy-2'-fluoroadenosine-3'-phosphorothioate
  modified_base 3: mod_base = OTHER; note = 2'-O-methylguanosine-3'-phosphate
  modified_base 4: mod_base = OTHER; note = 2'-O-methyladenosine-3'-phosphate
  modified_base 5: mod_base = OTHER; note = 2'-O-methyluridine-3'-phosphate
  modified_base 6: mod_base = OTHER; note = 2'-deoxy-2'-fluorouridine-3'-phosphate
  modified_base 7: mod_base = OTHER; note = 2'-O-methyladenosine-3'-phosphate
  modified_base 8: mod_base = OTHER; note = 2'-deoxy-2'-fluoroadenosine-3'-phosphate
  modified_base 9: mod_base = OTHER; note = 2'-deoxy-2'-fluorocytidine-3'-phosphate
  modified_base 10: mod_base = OTHER; note = 2'-O-methyladenosine-3'-phosphate
  modified_base 11: mod_base = OTHER; note = 2'-O-methylguanosine-3'-phosphate
  modified_base 12: mod_base = OTHER; note = 2'-O-methylcytidine-3'-phosphate
  modified_base 13: mod_base = OTHER; note = 2'-O-methyladenosine-3'-phosphate
  modified_base 14: mod_base = OTHER; note = 2'-deoxy-2'-fluoroadenosine-3'-phosphate
  modified_base 15: mod_base = OTHER; note = 2'-O-methyladenosine-3'-phosphate
  modified_base 16: mod_base = OTHER; note = 2'-deoxy-2'-fluoroguanosine-3'-phosphate
  modified_base 17: mod_base = OTHER; note = 2'-O-methyladenosine-3'-phosphate
  modified_base 18: mod_base = OTHER; note = 2'-O-methylguanosine-3'-phosphate
  modified_base 19: mod_base = OTHER; note = 2'-O-methyluridine-3'-phosphate
  modified_base 20: mod_base = OTHER; note = 2'-O-methyluridine-3'-phosphate
  modified_base 21: mod_base = OTHER; note = 2'-O-methylcytidine-3'-phosphorothioate
  modified_base 22: mod_base = OTHER; note = 2'-O-methyluridine-3'-phosphorothioate
  modified_base 23: mod_base = OTHER; note = 2'-O-methyladenosine
aagattaacagcaaagagttcta

SEQ ID NO: 5975 - RNA, 23 nt, synthetic construct
  source 1..23: mol_type = other RNA
  modified_base 1: mod_base = OTHER; note = 2'-O-methyladenosine-3'-phosphorothioate
  modified_base 2: mod_base = OTHER; note = 2'-deoxy-2'-fluoroadenosine-3'-phosphorothioate
  modified_base 3: mod_base = OTHER; note = 2'-O-methyladenosine-3'-phosphate
  modified_base 4: mod_base = OTHER; note = 2'-O-methyladenosine-3'-phosphate
  modified_base 5: mod_base = OTHER; note = 2'-O-methyluridine-3'-phosphate
  modified_base 6: mod_base = OTHER; note = 2'-deoxy-2'-fluorocytidine-3'-phosphate
  modified_base 7: mod_base = OTHER; note = 2'-O-methyladenosine-3'-phosphate
  modified_base 8: mod_base = OTHER; note = 2'-deoxy-2'-fluorouridine-3'-phosphate
  modified_base 9: mod_base = OTHER; note = 2'-deoxy-2'-fluorocytidine-3'-phosphate
  modified_base 10: mod_base = OTHER; note = 2'-O-methylcytidine-3'-phosphate
  modified_base 11: mod_base = OTHER; note = 2'-O-methyladenosine-3'-phosphate
  modified_base 12: mod_base = OTHER; note = 2'-O-methyluridine-3'-phosphate
  modified_base 13: mod_base = OTHER; note = 2'-O-methyluridine-3'-phosphate
  modified_base 14: mod_base = OTHER; note = 2'-deoxy-2'-fluorouridine-3'-phosphate
  modified_base 15: mod_base = OTHER; note = 2'-O-methyluridine-3'-phosphate
  modified_base 16: mod_base = OTHER; note = 2'-deoxy-2'-fluoroadenosine-3'-phosphate
  modified_base 17: mod_base = OTHER; note = 2'-O-methyladenosine-3'-phosphate
  modified_base 18: mod_base = OTHER; note = 2'-O-methylcytidine-3'-phosphate
  modified_base 19: mod_base = OTHER; note = 2'-O-methylcytidine-3'-phosphate
  modified_base 20: mod_base = OTHER; note = 2'-O-methyladenosine-3'-phosphate
  modified_base 21: mod_base = OTHER; note = 2'-O-methylguanosine-3'-phosphorothioate
  modified_base 22: mod_base = OTHER; note = 2'-O-methylguanosine-3'-phosphorothioate
  modified_base 23: mod_base = OTHER; note = 2'-O-methyladenosine
aaaatcatccattttaaccagga

SEQ ID NO: 5976 - RNA, 23 nt, synthetic construct
  source 1..23: mol_type = other RNA
  modified_base 1: mod_base = OTHER; note = 2'-O-methyladenosine-3'-phosphorothioate
  modified_base 2: mod_base = OTHER; note = 2'-deoxy-2'-fluorouridine-3'-phosphorothioate
  modified_base 3: mod_base = OTHER; note = 2'-O-methyluridine-3'-phosphate
  modified_base 4: mod_base = OTHER; note = 2'-O-methyladenosine-3'-phosphate
  modified_base 5: mod_base = OTHER; note = 2'-O-methyladenosine-3'-phosphate
  modified_base 6: mod_base = OTHER; note = 2'-deoxy-2'-fluorouridine-3'-phosphate
  modified_base 7: mod_base = OTHER; note = 2'-O-methylcytidine-3'-phosphate
  modified_base 8: mod_base = OTHER; note = 2'-deoxy-2'-fluoroadenosine-3'-phosphate
  modified_base 9: mod_base = OTHER; note = 2'-deoxy-2'-fluoroguanosine-3'-phosphate
  modified_base 10: mod_base = OTHER; note = 2'-O-methylcytidine-3'-phosphate
  modified_base 11: mod_base = OTHER; note = 2'-O-methyladenosine-3'-phosphate
  modified_base 12: mod_base = OTHER; note = 2'-O-methyladenosine-3'-phosphate
  modified_base 13: mod_base = OTHER; note = 2'-O-methyladenosine-3'-phosphate
  modified_base 14: mod_base = OTHER; note = 2'-deoxy-2'-fluoroadenosine-3'-phosphate
  modified_base 15: mod_base = OTHER; note = 2'-O-methylcytidine-3'-phosphate
  modified_base 16: mod_base = OTHER; note = 2'-deoxy-2'-fluorouridine-3'-phosphate
  modified_base 17: mod_base = OTHER; note = 2'-O-methyluridine-3'-phosphate
  modified_base 18: mod_base = OTHER; note = 2'-O-methyluridine-3'-phosphate
  modified_base 19: mod_base = OTHER; note = 2'-O-methylcytidine-3'-phosphate
  modified_base 20: mod_base = OTHER; note = 2'-O-methyladenosine-3'-phosphate
  modified_base 21: mod_base = OTHER; note = 2'-O-methyladenosine-3'-phosphorothioate
  modified_base 22: mod_base = OTHER; note = 2'-O-methyluridine-3'-phosphorothioate
  modified_base 23: mod_base = OTHER; note = 2'-O-methylguanosine
attaatcagcaaaactttcaatg

SEQ ID NO: 5977 - RNA, 23 nt, synthetic construct
  source 1..23: mol_type = other RNA
  modified_base 1: mod_base = OTHER; note = 2'-O-methyladenosine-3'-phosphorothioate
  modified_base 2: mod_base = OTHER; note = 2'-deoxy-2'-fluorouridine-3'-phosphorothioate
  modified_base 3: mod_base = OTHER; note = 2'-O-methylcytidine-3'-phosphate
  modified_base 4: mod_base = OTHER; note = 2'-O-methyladenosine-3'-phosphate
  modified_base 5: mod_base = OTHER; note = 2'-O-methyluridine-3'-phosphate
  modified_base 6: mod_base = OTHER; note = 2'-deoxy-2'-fluorocytidine-3'-phosphate
  modified_base 7: mod_base = OTHER; note = 2'-O-methylcytidine-3'-phosphate
  modified_base 8: mod_base = OTHER; note = 2'-deoxy-2'-fluorocytidine-3'-phosphate
  modified_base 9: mod_base = OTHER; note = 2'-deoxy-2'-fluoroadenosine-3'-phosphate
  modified_base 10: mod_base = OTHER; note = 2'-O-methylcytidine-3'-phosphate
  modified_base 11: mod_base = OTHER; note = 2'-O-methyluridine-3'-phosphate
  modified_base 12: mod_base = OTHER; note = 2'-O-methyluridine-3'-phosphate
  modified_base 13: mod_base = OTHER; note = 2'-O-methyluridine-3'-phosphate
  modified_base 14: mod_base = OTHER; note = 2'-deoxy-2'-fluoroadenosine-3'-phosphate
  modified_base 15: mod_base = OTHER; note = 2'-O-methyladenosine-3'-phosphate
  modified_base 16: mod_base = OTHER; note = 2'-deoxy-2'-fluorouridine-3'-phosphate
  modified_base 17: mod_base = OTHER; note = 2'-O-methyluridine-3'-phosphate
  modified_base 18: mod_base = OTHER; note = 2'-O-methylguanosine-3'-phosphate
  modified_base 19: mod_base = OTHER; note = 2'-O-methyluridine-3'-phosphate
  modified_base 20: mod_base = OTHER; note = 2'-O-methyluridine-3'-phosphate
  modified_base 21: mod_base = OTHER; note = 2'-O-methyladenosine-3'-phosphorothioate
  modified_base 22: mod_base = OTHER; note = 2'-O-methyladenosine-3'-phosphorothioate
  modified_base 23: mod_base = OTHER; note = 2'-O-methyluridine
atcatcccactttaattgttaat

SEQ ID NO: 5978 - RNA, 23 nt, synthetic construct
  source 1..23: mol_type = other RNA
  modified_base 1: mod_base = OTHER; note = 2'-O-methyladenosine-3'-phosphorothioate
  modified_base 2: mod_base = OTHER; note = 2'-deoxy-2'-fluorouridine-3'-phosphorothioate
  modified_base 3: mod_base = OTHER; note = 2'-O-methyluridine-3'-phosphate
  modified_base 4: mod_base = OTHER; note = 2'-O-methyluridine-3'-phosphate
  modified_base 5: mod_base = OTHER; note = 2'-O-methylcytidine-3'-phosphate
  modified_base 6: mod_base = OTHER; note = 2'-deoxy-2'-fluoroadenosine-3'-phosphate
  modified_base 7: mod_base = OTHER; note = 2'-O-methyluridine-3'-phosphate
  modified_base 8: mod_base = OTHER; note = 2'-deoxy-2'-fluoroadenosine-3'-phosphate
  modified_base 9: mod_base = OTHER; note = 2'-deoxy-2'-fluoroadenosine-3'-phosphate
  modified_base 10: mod_base = OTHER; note = 2'-O-methylguanosine-3'-phosphate
  modified_base 11: mod_base = OTHER; note = 2'-O-methyluridine-3'-phosphate
  modified_base 12: mod_base = OTHER; note = 2'-O-methylguanosine-3'-phosphate
  modified_base 13: mod_base = OTHER; note = 2'-O-methyladenosine-3'-phosphate
  modified_base 14: mod_base = OTHER; note = 2'-deoxy-2'-fluorouridine-3'-phosphate
  modified_base 15: mod_base = OTHER; note = 2'-O-methyluridine-3'-phosphate
  modified_base 16: mod_base = OTHER; note = 2'-deoxy-2'-fluorouridine-3'-phosphate
  modified_base 17: mod_base = OTHER; note = 2'-O-methyluridine-3'-phosphate
  modified_base 18: mod_base = OTHER; note = 2'-O-methylguanosine-3'-phosphate
  modified_base 19: mod_base = OTHER; note = 2'-O-methylcytidine-3'-phosphate
  modified_base 20: mod_base = OTHER; note = 2'-O-methylcytidine-3'-phosphate
  modified_base 21: mod_base = OTHER; note = 2'-O-methylcytidine-3'-phosphorothioate
  modified_base 22: mod_base = OTHER; note = 2'-O-methyladenosine-3'-phosphorothioate
  modified_base 23: mod_base = OTHER; note = 2'-O-methylcytidine
atttcataagtgattttgcccac

SEQ ID NO: 5979 - RNA, 23 nt, synthetic construct
  source 1..23: mol_type = other RNA
  modified_base 1: mod_base = OTHER; note = 2'-O-methyladenosine-3'-phosphorothioate
  modified_base 2: mod_base = OTHER; note = 2'-deoxy-2'-fluoroadenosine-3'-phosphorothioate
  modified_base 3: mod_base = OTHER; note = 2'-O-methyladenosine-3'-phosphate
  modified_base 4: mod_base = OTHER; note = 2'-O-methyladenosine-3'-phosphate
  modified_base 5: mod_base = OTHER; note = 2'-O-methylcytidine-3'-phosphate
  modified_base 6: mod_base = OTHER; note = 2'-deoxy-2'-fluorocytidine-3'-phosphate
  modified_base 7: mod_base = OTHER; note = 2'-O-methyladenosine-3'-phosphate
  modified_base 8: mod_base = OTHER; note = 2'-deoxy-2'-fluoroadenosine-3'-phosphate
  modified_base 9: mod_base = OTHER; note = 2'-deoxy-2'-fluorocytidine-3'-phosphate
  modified_base 10: mod_base = OTHER; note = 2'-O-methyluridine-3'-phosphate
  modified_base 11: mod_base = OTHER; note = 2'-O-methylguanosine-3'-phosphate
  modified_base 12: mod_base = OTHER; note = 2'-O-methyladenosine-3'-phosphate
  modified_base 13: mod_base = OTHER; note = 2'-O-methyluridine-3'-phosphate
  modified_base 14: mod_base = OTHER; note = 2'-deoxy-2'-fluorouridine-3'-phosphate
  modified_base 15: mod_base = OTHER; note = 2'-O-methylcytidine-3'-phosphate
  modified_base 16: mod_base = OTHER; note = 2'-deoxy-2'-fluorouridine-3'-phosphate
  modified_base 17: mod_base = OTHER; note = 2'-O-methyluridine-3'-phosphate
  modified_base 18: mod_base = OTHER; note = 2'-O-methylguanosine-3'-phosphate
  modified_base 19: mod_base = OTHER; note = 2'-O-methylcytidine-3'-phosphate
  modified_base 20: mod_base = OTHER; note = 2'-O-methyluridine-3'-phosphate
  modified_base 21: mod_base = OTHER; note = 2'-O-methyluridine-3'-phosphorothioate
  modified_base 22: mod_base = OTHER; note = 2'-O-methylcytidine-3'-phosphorothioate
  modified_base 23: mod_base = OTHER; note = 2'-O-methyluridine
aaaaccaactgattcttgcttct

SEQ ID NO: 5980 - RNA, 23 nt, synthetic construct
  source 1..23: mol_type = other RNA
  modified_base 1: mod_base = OTHER; note = 2'-O-methyladenosine-3'-phosphorothioate
  modified_base 2: mod_base = OTHER; note = 2'-deoxy-2'-fluoroguanosine-3'-phosphorothioate
  modified_base 3: mod_base = OTHER; note = 2'-O-methylcytidine-3'-phosphate
  modified_base 4: mod_base = OTHER; note = 2'-O-methyluridine-3'-phosphate
  modified_base 5: mod_base = OTHER; note = 2'-O-methyluridine-3'-phosphate
  modified_base 6: mod_base = OTHER; note = 2'-deoxy-2'-fluorouridine-3'-phosphate
  modified_base 7: mod_base = OTHER; note = 2'-O-methyladenosine-3'-phosphate
  modified_base 8: mod_base = OTHER; note = 2'-deoxy-2'-fluorouridine-3'-phosphate
  modified_base 9: mod_base = OTHER; note = 2'-deoxy-2'-fluoroguanosine-3'-phosphate
  modified_base 10: mod_base = OTHER; note = 2'-O-methyluridine-3'-phosphate
  modified_base 11: mod_base = OTHER; note = 2'-O-methylguanosine-3'-phosphate
  modified_base 12: mod_base = OTHER; note = 2'-O-methylguanosine-3'-phosphate
  modified_base 13: mod_base = OTHER; note = 2'-O-methyluridine-3'-phosphate
  modified_base 14: mod_base = OTHER; note = 2'-deoxy-2'-fluoroadenosine-3'-phosphate
  modified_base 15: mod_base = OTHER; note = 2'-O-methylguanosine-3'-phosphate
  modified_base 16: mod_base = OTHER; note = 2'-deoxy-2'-fluorocytidine-3'-phosphate
  modified_base 17: mod_base = OTHER; note = 2'-O-methyladenosine-3'-phosphate
  modified_base 18: mod_base = OTHER; note = 2'-O-methyladenosine-3'-phosphate
  modified_base 19: mod_base = OTHER; note = 2'-O-methyladenosine-3'-phosphate
  modified_base 20: mod_base = OTHER; note = 2'-O-methylcytidine-3'-phosphate
  modified_base 21: mod_base = OTHER; note = 2'-O-methylcytidine-3'-phosphorothioate
  modified_base 22: mod_base = OTHER; note = 2'-O-methyladenosine-3'-phosphorothioate
  modified_base 23: mod_base = OTHER; note = 2'-O-methyladenosine
agctttatgtggtagcaaaccaa

SEQ ID NO: 5981 - RNA, 23 nt, synthetic construct
  source 1..23: mol_type = other RNA
  modified_base 1: mod_base = OTHER; note = 2'-O-methyladenosine-3'-phosphorothioate
  modified_base 2: mod_base = OTHER; note = 2'-deoxy-2'-fluoroguanosine-3'-phosphorothioate
  modified_base 3: mod_base = OTHER; note = 2'-O-methyluridine-3'-phosphate
  modified_base 4: mod_base = OTHER; note = 2'-O-methyluridine-3'-phosphate
  modified_base 5: mod_base = OTHER; note = 2'-O-methyluridine-3'-phosphate
  modified_base 6: mod_base = OTHER; note = 2'-deoxy-2'-fluoroguanosine-3'-phosphate
  modified_base 7: mod_base = OTHER; note = 2'-O-methyladenosine-3'-phosphate
  modified_base 8: mod_base = OTHER; note = 2'-deoxy-2'-fluorocytidine-3'-phosphate
  modified_base 9: mod_base = OTHER; note = 2'-deoxy-2'-fluorocytidine-3'-phosphate
  modified_base 10: mod_base = OTHER; note = 2'-O-methyladenosine-3'-phosphate
  modified_base 11: mod_base = OTHER; note = 2'-O-methyladenosine-3'-phosphate
  modified_base 12: mod_base = OTHER; note = 2'-O-methyladenosine-3'-phosphate
  modified_base 13: mod_base = OTHER; note = 2'-O-methyladenosine-3'-phosphate
  modified_base 14: mod_base = OTHER; note = 2'-deoxy-2'-fluoroadenosine-3'-phosphate
  modified_base 15: mod_base = OTHER; note = 2'-O-methylcytidine-3'-phosphate
  modified_base 16: mod_base = OTHER; note = 2'-deoxy-2'-fluoroadenosine-3'-phosphate
  modified_base 17: mod_base = OTHER; note = 2'-O-methylguanosine-3'-phosphate
  modified_base 18: mod_base = OTHER; note = 2'-O-methylcytidine-3'-phosphate
  modified_base 19: mod_base = OTHER; note = 2'-O-methyladenosine-3'-phosphate
  modified_base 20: mod_base = OTHER; note = 2'-O-methyluridine-3'-phosphate
  modified_base 21: mod_base = OTHER; note = 2'-O-methylguanosine-3'-phosphorothioate
  modified_base 22: mod_base = OTHER; note = 2'-O-methylguanosine-3'-phosphorothioate
  modified_base 23: mod_base = OTHER; note = 2'-O-methylcytidine
agtttgaccaaaaacagcatggc

SEQ ID NO: 5982 - RNA, 23 nt, synthetic construct
  source 1..23: mol_type = other RNA
  modified_base 1: mod_base = OTHER; note = 2'-O-methyladenosine-3'-phosphorothioate
  modified_base 2: mod_base = OTHER; note = 2'-deoxy-2'-fluorouridine-3'-phosphorothioate
  modified_base 3: mod_base = OTHER; note = 2'-O-methyluridine-3'-phosphate
  modified_base 4: mod_base = OTHER; note = 2'-O-methyluridine-3'-phosphate
  modified_base 5: mod_base = OTHER; note = 2'-O-methylcytidine-3'-phosphate
  modified_base 6: mod_base = OTHER; note = 2'-deoxy-2'-fluorocytidine-3'-phosphate
  modified_base 7: mod_base = OTHER; note = 2'-O-methyladenosine-3'-phosphate
  modified_base 8: mod_base = OTHER; note = 2'-deoxy-2'-fluoroguanosine-3'-phosphate
  modified_base 9: mod_base = OTHER; note = 2'-deoxy-2'-fluorouridine-3'-phosphate
  modified_base 10: mod_base = OTHER; note = 2'-O-methyluridine-3'-phosphate
  modified_base 11: mod_base = OTHER; note = 2'-O-methyluridine-3'-phosphate
  modified_base 12: mod_base = OTHER; note = 2'-O-methyladenosine-3'-phosphate
  modified_base 13: mod_base = OTHER; note = 2'-O-methylcytidine-3'-phosphate
  modified_base 14: mod_base = OTHER; note = 2'-deoxy-2'-fluoroadenosine-3'-phosphate
  modified_base 15: mod_base = OTHER; note = 2'-O-methylcytidine-3'-phosphate
  modified_base 16: mod_base = OTHER; note = 2'-deoxy-2'-fluoroadenosine-3'-phosphate
  modified_base 17: mod_base = OTHER; note = 2'-O-methylguanosine-3'-phosphate
  modified_base 18: mod_base = OTHER; note = 2'-O-methyluridine-3'-phosphate
  modified_base 19: mod_base = OTHER; note = 2'-O-methyluridine-3'-phosphate
  modified_base 20: mod_base = OTHER; note = 2'-O-methyluridine-3'-phosphate
  modified_base 21: mod_base = OTHER; note = 2'-O-methylguanosine-3'-phosphorothioate
  modified_base 22: mod_base = OTHER; note = 2'-O-methyladenosine-3'-phosphorothioate
  modified_base 23: mod_base = OTHER; note = 2'-O-methylcytidine
atttccagtttacacagtttgac

SEQ ID NO: 5983 - RNA, 23 nt, synthetic construct
  source 1..23: mol_type = other RNA
  modified_base 1: mod_base = OTHER; note = 2'-O-methyladenosine-3'-phosphorothioate
  modified_base 2: mod_base = OTHER; note = 2'-deoxy-2'-fluorocytidine-3'-phosphorothioate
  modified_base 3: mod_base = OTHER; note = 2'-O-methyluridine-3'-phosphate
  modified_base 4: mod_base = OTHER; note = 2'-O-methyladenosine-3'-phosphate
  modified_base 5: mod_base = OTHER; note = 2'-O-methyladenosine-3'-phosphate
  modified_base 6: mod_base = OTHER; note = 2'-deoxy-2'-fluoroadenosine-3'-phosphate
  modified_base 7: mod_base = OTHER; note = 2'-O-methylguanosine-3'-phosphate
  modified_base 8: mod_base = OTHER; note = 2'-deoxy-2'-fluorouridine-3'-phosphate
  modified_base 9: mod_base = OTHER; note = 2'-deoxy-2'-fluoroguanosine-3'-phosphate
  modified_base 10: mod_base = OTHER; note = 2'-O-methyladenosine-3'-phosphate
  modified_base 11: mod_base = OTHER; note = 2'-O-methyluridine-3'-phosphate
  modified_base 12: mod_base = OTHER; note = 2'-O-methyluridine-3'-phosphate
  modified_base 13: mod_base = OTHER; note = 2'-O-methyladenosine-3'-phosphate
  modified_base 14: mod_base = OTHER; note = 2'-deoxy-2'-fluoroadenosine-3'-phosphate
  modified_base 15: mod_base = OTHER; note = 2'-O-methyladenosine-3'-phosphate
  modified_base 16: mod_base = OTHER; note = 2'-deoxy-2'-fluorocytidine-3'-phosphate
  modified_base 17: mod_base = OTHER; note = 2'-O-methyluridine-3'-phosphate
  modified_base 18: mod_base = OTHER; note = 2'-O-methylcytidine-3'-phosphate
  modified_base 19: mod_base = OTHER; note = 2'-O-methyladenosine-3'-phosphate
  modified_base 20: mod_base = OTHER; note = 2'-O-methylguanosine-3'-phosphate
  modified_base 21: mod_base = OTHER; note = 2'-O-methyladenosine-3'-phosphorothioate
  modified_base 22: mod_base = OTHER; note = 2'-O-methyladenosine-3'-phosphorothioate
  modified_base 23: mod_base = OTHER; note = 2'-O-methyladenosine
actaaagtgattaaactcagaaa

SEQ ID NO: 5984 - RNA, 23 nt, synthetic construct
  source 1..23: mol_type = other RNA
  modified_base 1: mod_base = OTHER; note = 2'-O-methyladenosine-3'-phosphorothioate
  modified_base 2: mod_base = OTHER; note = 2'-deoxy-2'-fluoroadenosine-3'-phosphorothioate
  modified_base 3: mod_base = OTHER; note = 2'-O-methylcytidine-3'-phosphate
  modified_base 4: mod_base = OTHER; note = 2'-O-methyladenosine-3'-phosphate
  modified_base 5: mod_base = OTHER; note = 2'-O-methyladenosine-3'-phosphate
  modified_base 6: mod_base = OTHER; note = 2'-deoxy-2'-fluorouridine-3'-phosphate
  modified_base 7: mod_base = OTHER; note = 2'-O-methylguanosine-3'-phosphate
  modified_base 8: mod_base = OTHER; note = 2'-deoxy-2'-fluorouridine-3'-phosphate
  modified_base 9: mod_base = OTHER; note = 2'-deoxy-2'-fluoroguanosine-3'-phosphate
  modified_base 10: mod_base = OTHER; note = 2'-O-methyladenosine-3'-phosphate
  modified_base 11: mod_base = OTHER; note = 2'-O-methyladenosine-3'-phosphate
  modified_base 12: mod_base = OTHER; note = 2'-O-methyluridine-3'-phosphate
  modified_base 13: mod_base = OTHER; note = 2'-O-methyladenosine-3'-phosphate
  modified_base 14: mod_base = OTHER; note = 2'-deoxy-2'-fluorouridine-3'-phosphate
  modified_base 15: mod_base = OTHER; note = 2'-O-methyladenosine-3'-phosphate
  modified_base 16: mod_base = OTHER; note = 2'-deoxy-2'-fluorouridine-3'-phosphate
  modified_base 17: mod_base = OTHER; note = 2'-O-methylcytidine-3'-phosphate
  modified_base 18: mod_base = OTHER; note = 2'-O-methylcytidine-3'-phosphate
  modified_base 19: mod_base = OTHER; note = 2'-O-methyluridine-3'-phosphate
  modified_base 20: mod_base = OTHER; note = 2'-O-methyladenosine-3'-phosphate
  modified_base 21: mod_base = OTHER; note = 2'-O-methyladenosine-3'-phosphorothioate
  modified_base 22: mod_base = OTHER; note = 2'-O-methyladenosine-3'-phosphorothioate
  modified_base 23: mod_base = OTHER; note = 2'-O-methylguanosine
aacaatgtgaatatatcctaaag

SEQ ID NO: 5985 - RNA, 23 nt, synthetic construct
  source 1..23: mol_type = other RNA
  modified_base 1: mod_base = OTHER; note = 2'-O-methyladenosine-3'-phosphorothioate
  modified_base 2: mod_base = OTHER; note = 2'-deoxy-2'-fluoroadenosine-3'-phosphorothioate
  modified_base 3: mod_base = OTHER; note = 2'-O-methyladenosine-3'-phosphate
  modified_base 4: mod_base = OTHER; note = 2'-O-methylcytidine-3'-phosphate
  modified_base 5: mod_base = OTHER; note = 2'-O-methyladenosine-3'-phosphate
  modified_base 6: mod_base = OTHER; note = 2'-deoxy-2'-fluoroadenosine-3'-phosphate
  modified_base 7: mod_base = OTHER; note = 2'-O-methyluridine-3'-phosphate
  modified_base 8: mod_base = OTHER; note = 2'-deoxy-2'-fluorouridine-3'-phosphate
  modified_base 9: mod_base = OTHER; note = 2'-deoxy-2'-fluorocytidine-3'-phosphate
  modified_base 10: mod_base = OTHER; note = 2'-O-methyladenosine-3'-phosphate
  modified_base 11: mod_base = OTHER; note = 2'-O-methyladenosine-3'-phosphate
  modified_base 12: mod_base = OTHER; note = 2'-O-methyluridine-3'-phosphate
  modified_base 13: mod_base = OTHER; note = 2'-O-methyluridine-3'-phosphate
  modified_base 14: mod_base = OTHER; note = 2'-deoxy-2'-fluorocytidine-3'-phosphate
  modified_base 15: mod_base = OTHER; note = 2'-O-methyladenosine-3'-phosphate
  modified_base 16: mod_base = OTHER; note = 2'-deoxy-2'-fluoroguanosine-3'-phosphate
  modified_base 17: mod_base = OTHER; note = 2'-O-methylcytidine-3'-phosphate
  modified_base 18: mod_base = OTHER; note = 2'-O-methyladenosine-3'-phosphate
  modified_base 19: mod_base = OTHER; note = 2'-O-methyladenosine-3'-phosphate
  modified_base 20: mod_base = OTHER; note = 2'-O-methyladenosine-3'-phosphate
  modified_base 21: mod_base = OTHER; note = 2'-O-methyluridine-3'-phosphorothioate
  modified_base 22: mod_base = OTHER; note = 2'-O-methyluridine-3'-phosphorothioate
  modified_base 23: mod_base = OTHER; note = 2'-O-methylcytidine
aaacaattcaattcagcaaattc

SEQ ID NO: 5986 - RNA, 23 nt, synthetic construct
  source 1..23: mol_type = other RNA
  modified_base 1: mod_base = OTHER; note = 2'-O-methyladenosine-3'-phosphorothioate
  modified_base 2: mod_base = OTHER; note = 2'-deoxy-2'-fluoroguanosine-3'-phosphorothioate
  modified_base 3: mod_base = OTHER; note = 2'-O-methyladenosine-3'-phosphate
  modified_base 4: mod_base = OTHER; note = 2'-O-methylguanosine-3'-phosphate
  modified_base 5: mod_base = OTHER; note = 2'-O-methyladenosine-3'-phosphate
  modified_base 6: mod_base = OTHER; note = 2'-deoxy-2'-fluorouridine-3'-phosphate
  modified_base 7: mod_base = OTHER; note = 2'-O-methylcytidine-3'-phosphate
  modified_base 8: mod_base = OTHER; note = 2'-deoxy-2'-fluoroadenosine-3'-phosphate
  modified_base 9: mod_base = OTHER; note = 2'-deoxy-2'-fluorocytidine-3'-phosphate
  modified_base 10: mod_base = OTHER; note = 2'-O-methyladenosine-3'-phosphate
  modified_base 11: mod_base = OTHER; note = 2'-O-methylguanosine-3'-phosphate
  modified_base 12: mod_base = OTHER; note = 2'-O-methyladenosine-3'-phosphate
  modified_base 13: mod_base = OTHER; note = 2'-O-methyluridine-3'-phosphate
  modified_base 14: mod_base = OTHER; note = 2'-deoxy-2'-fluorouridine-3'-phosphate
  modified_base 15: mod_base = OTHER; note = 2'-O-methyluridine-3'-phosphate
  modified_base 16: mod_base = OTHER; note = 2'-deoxy-2'-fluoroguanosine-3'-phosphate
  modified_base 17: mod_base = OTHER; note = 2'-O-methyladenosine-3'-phosphate
  modified_base 18: mod_base = OTHER; note = 2'-O-methylguanosine-3'-phosphate
  modified_base 19: mod_base = OTHER; note = 2'-O-methyladenosine-3'-phosphate
  modified_base 20: mod_base = OTHER; note = 2'-O-methyladenosine-3'-phosphate
  modified_base 21: mod_base = OTHER; note = 2'-O-methyladenosine-3'-phosphorothioate
  modified_base 22: mod_base = OTHER; note = 2'-O-methylguanosine-3'-phosphorothioate
  modified_base 23: mod_base = OTHER; note = 2'-O-methyladenosine
agagatcacagatttgagaaaga

SEQ ID NO: 5987 - RNA, 23 nt, synthetic construct
  source 1..23: mol_type = other RNA
  modified_base 1: mod_base = OTHER; note = 2'-O-methyladenosine-3'-phosphorothioate
  modified_base 2: mod_base = OTHER; note = 2'-deoxy-2'-fluoroadenosine-3'-phosphorothioate
  modified_base 3: mod_base = OTHER; note = 2'-O-methylcytidine-3'-phosphate
  modified_base 4: mod_base = OTHER; note = 2'-O-methyladenosine-3'-phosphate
  modified_base 5: mod_base = OTHER; note = 2'-O-methylguanosine-3'-phosphate
  modified_base 6: mod_base = OTHER; note = 2'-deoxy-2'-fluoroguanosine-3'-phosphate
  modified_base 7: mod_base = OTHER; note = 2'-O-methyladenosine-3'-phosphate
  modified_base 8: mod_base = OTHER; note = 2'-deoxy-2'-fluorouridine-3'-phosphate
  modified_base 9: mod_base = OTHER; note = 2'-deoxy-2'-fluoroadenosine-3'-phosphate
  modified_base 10: mod_base = OTHER; note = 2'-O-methyladenosine-3'-phosphate
  modified_base 11: mod_base = OTHER; note = 2'-O-methyladenosine-3'-phosphate
  modified_base 12: mod_base = OTHER; note = 2'-O-methylguanosine-3'-phosphate
  modified_base 13: mod_base = OTHER; note = 2'-O-methyladenosine-3'-phosphate
  modified_base 14: mod_base = OTHER; note = 2'-deoxy-2'-fluoroadenosine-3'-phosphate
  modified_base 15: mod_base = OTHER; note = 2'-O-methyladenosine-3'-phosphate
  modified_base 16: mod_base = OTHER; note = 2'-deoxy-2'-fluoroadenosine-3'-phosphate
  modified_base 17: mod_base = OTHER; note = 2'-O-methylguanosine-3'-phosphate
  modified_base 18: mod_base = OTHER; note = 2'-O-methyladenosine-3'-phosphate
  modified_base 19: mod_base = OTHER; note = 2'-O-methylguanosine-3'-phosphate
  modified_base 20: mod_base = OTHER; note = 2'-O-methyladenosine-3'-phosphate
  modified_base 21: mod_base = OTHER; note = 2'-O-methyluridine-3'-phosphorothioate
  modified_base 22: mod_base = OTHER; note = 2'-O-methylcytidine-3'-phosphorothioate
  modified_base 23: mod_base = OTHER; note = 2'-O-methyladenosine
aacaggataaagaaaagagatca

SEQ ID NO: 5988 - RNA, 23 nt, synthetic construct
  source 1..23: mol_type = other RNA
  modified_base 1: mod_base = OTHER; note = 2'-O-methyladenosine-3'-phosphorothioate
  modified_base 2: mod_base = OTHER; note = 2'-deoxy-2'-fluoroadenosine-3'-phosphorothioate
  modified_base 3: mod_base = OTHER; note = 2'-O-methyluridine-3'-phosphate
  modified_base 4: mod_base = OTHER; note = 2'-O-methyladenosine-3'-phosphate
  modified_base 5: mod_base = OTHER; note = 2'-O-methyladenosine-3'-phosphate
  modified_base 6: mod_base = OTHER; note = 2'-deoxy-2'-fluoroguanosine-3'-phosphate
  modified_base 7: mod_base = OTHER; note = 2'-O-methyladenosine-3'-phosphate
  modified_base 8: mod_base = OTHER; note = 2'-deoxy-2'-fluoroadenosine-3'-phosphate
  modified_base 9: mod_base = OTHER; note = 2'-deoxy-2'-fluoroadenosine-3'-phosphate
  modified_base 10: mod_base = OTHER; note = 2'-O-methylguanosine-3'-phosphate
  modified_base 11: mod_base = OTHER; note = 2'-O-methylcytidine-3'-phosphate
  modified_base 12: mod_base = OTHER; note = 2'-O-methyladenosine-3'-phosphate
  modified_base 13: mod_base = OTHER; note = 2'-O-methyladenosine-3'-phosphate
  modified_base 14: mod_base = OTHER; note = 2'-deoxy-2'-fluoroadenosine-3'-phosphate
  modified_base 15: mod_base = OTHER; note = 2'-O-methylcytidine-3'-phosphate
  modified_base 16: mod_base = OTHER; note = 2'-deoxy-2'-fluoroguanosine-3'-phosphate
  modified_base 17: mod_base = OTHER; note = 2'-O-methyladenosine-3'-phosphate
  modified_base 18: mod_base = OTHER; note = 2'-O-methyladenosine-3'-phosphate
  modified_base 19: mod_base = OTHER; note = 2'-O-methyladenosine-3'-phosphate
  modified_base 20: mod_base = OTHER; note = 2'-O-methylguanosine-3'-phosphate
  modified_base 21: mod_base = OTHER; note = 2'-O-methylguanosine-3'-phosphorothioate
  modified_base 22: mod_base = OTHER; note = 2'-O-methyladenosine-3'-phosphorothioate
  modified_base 23: mod_base = OTHER; note = 2'-O-methyladenosine
aataagaaagcaaacgaaaggaa

SEQ ID NO: 5989 - RNA, 23 nt, synthetic construct
  source 1..23: mol_type = other RNA
  modified_base 1: mod_base = OTHER; note = 2'-O-methyladenosine-3'-phosphorothioate
  modified_base 2: mod_base = OTHER; note = 2'-deoxy-2'-fluorouridine-3'-phosphorothioate
  modified_base 3: mod_base = OTHER; note = 2'-O-methyladenosine-3'-phosphate
  modified_base 4: mod_base = OTHER; note = 2'-O-methyladenosine-3'-phosphate
  modified_base 5: mod_base = OTHER; note = 2'-O-methylguanosine-3'-phosphate
  modified_base 6: mod_base = OTHER; note = 2'-deoxy-2'-fluoroadenosine-3'-phosphate
  modified_base 7: mod_base = OTHER; note = 2'-O-methyladenosine-3'-phosphate
  modified_base 8: mod_base = OTHER; note = 2'-deoxy-2'-fluoroadenosine-3'-phosphate
  modified_base 9: mod_base = OTHER; note = 2'-deoxy-2'-fluoroadenosine-3'-phosphate
  modified_base 10: mod_base = OTHER; note = 2'-O-methylguanosine-3'-phosphate
  modified_base 11: mod_base = OTHER; note = 2'-O-methyladenosine-3'-phosphate
  modified_base 12: mod_base = OTHER; note = 2'-O-methyladenosine-3'-phosphate
  modified_base 13: mod_base = OTHER; note = 2'-O-methyluridine-3'-phosphate
  modified_base 14: mod_base = OTHER; note = 2'-deoxy-2'-fluoroguanosine-3'-phosphate
  modified_base 15: mod_base = OTHER; note = 2'-O-methylguanosine-3'-phosphate
  modified_base 16: mod_base = OTHER; note = 2'-deoxy-2'-fluoroadenosine-3'-phosphate
  modified_base 17: mod_base = OTHER; note = 2'-O-methyladenosine-3'-phosphate
  modified_base 18: mod_base = OTHER; note = 2'-O-methylcytidine-3'-phosphate
  modified_base 19: mod_base = OTHER; note = 2'-O-methyladenosine-3'-phosphate
  modified_base 20: mod_base = OTHER; note = 2'-O-methyladenosine-3'-phosphate
  modified_base 21: mod_base = OTHER; note = 2'-O-methyladenosine-3'-phosphorothioate
  modified_base 22: mod_base = OTHER; note = 2'-O-methyladenosine-3'-phosphorothioate
  modified_base 23: mod_base = OTHER; note = 2'-O-methylguanosine
ataagaaaagaatggaacaaaag

SEQ ID NO: 5990 - RNA, 23 nt, synthetic construct
  source 1..23: mol_type = other RNA
  modified_base 1: mod_base = OTHER; note = 2'-O-methyladenosine-3'-phosphorothioate
  modified_base 2: mod_base = OTHER; note = 2'-deoxy-2'-fluorouridine-3'-phosphorothioate
  modified_base 3: mod_base = OTHER; note = 2'-O-methylcytidine-3'-phosphate
  modified_base 4: mod_base = OTHER; note = 2'-O-methyluridine-3'-phosphate
  modified_base 5: mod_base = OTHER; note = 2'-O-methylcytidine-3'-phosphate
  modified_base 6: mod_base = OTHER; note = 2'-deoxy-2'-fluoroadenosine-3'-phosphate
  modified_base 7: mod_base = OTHER; note = 2'-O-methylcytidine-3'-phosphate
  modified_base 8: mod_base = OTHER; note = 2'-deoxy-2'-fluoroadenosine-3'-phosphate
  modified_base 9: mod_base = OTHER; note = 2'-deoxy-2'-fluorocytidine-3'-phosphate
  modified_base 10: mod_base = OTHER; note = 2'-O-methyladenosine-3'-phosphate
  modified_base 11: mod_base = OTHER; note = 2'-O-methylcytidine-3'-phosphate
  modified_base 12: mod_base = OTHER; note = 2'-O-methyluridine-3'-phosphate
  modified_base 13: mod_base = OTHER; note = 2'-O-methyladenosine-3'-phosphate
  modified_base 14: mod_base = OTHER; note = 2'-deoxy-2'-fluorocytidine-3'-phosphate
  modified_base 15: mod_base = OTHER; note = 2'-O-methyluridine-3'-phosphate
  modified_base 16: mod_base = OTHER; note = 2'-deoxy-2'-fluoroadenosine-3'-phosphate
  modified_base 17: mod_base = OTHER; note = 2'-O-methylguanosine-3'-phosphate
  modified_base 18: mod_base = OTHER; note = 2'-O-methylcytidine-3'-phosphate
  modified_base 19: mod_base = OTHER; note = 2'-O-methylcytidine-3'-phosphate
  modified_base 20: mod_base = OTHER; note = 2'-O-methyladenosine-3'-phosphate
  modified_base 21: mod_base = OTHER; note = 2'-O-methylguanosine-3'-phosphorothioate
  modified_base 22: mod_base = OTHER; note = 2'-O-methylcytidine-3'-phosphorothioate
  modified_base 23: mod_base = OTHER; note = 2'-O-methylcytidine
atctcacacactactagccagcc

SEQ ID NO: 5991 - RNA, 23 nt, synthetic construct
  source 1..23: mol_type = other RNA
  modified_base 1: mod_base = OTHER; note = 2'-O-methyladenosine-3'-phosphorothioate
  modified_base 2: mod_base = OTHER; note = 2'-deoxy-2'-fluorouridine-3'-phosphorothioate
  modified_base 3: mod_base = OTHER; note = 2'-O-methyluridine-3'-phosphate
  modified_base 4: mod_base = OTHER; note = 2'-O-methylcytidine-3'-phosphate
  modified_base 5: mod_base = OTHER; note = 2'-O-methyladenosine-3'-phosphate
  modified_base 6: mod_base = OTHER; note = 2'-deoxy-2'-fluorouridine-3'-phosphate
  modified_base 7: mod_base = OTHER; note = 2'-O-methyluridine-3'-phosphate
  modified_base 8: mod_base = OTHER; note = 2'-deoxy-2'-fluoroadenosine-3'-phosphate
  modified_base 9: mod_base = OTHER; note = 2'-deoxy-2'-fluorouridine-3'-phosphate
  modified_base 10: mod_base = OTHER; note = 2'-O-methylguanosine-3'-phosphate
  modified_base 11: mod_base = OTHER; note = 2'-O-methylcytidine-3'-phosphate
  modified_base 12: mod_base = OTHER; note = 2'-O-methyladenosine-3'-phosphate
  modified_base 13: mod_base = OTHER; note = 2'-O-methyladenosine-3'-phosphate
  modified_base 14: mod_base = OTHER; note = 2'-deoxy-2'-fluoroadenosine-3'-phosphate
  modified_base 15: mod_base = OTHER; note = 2'-O-methyluridine-3'-phosphate
  modified_base 16: mod_base = OTHER; note = 2'-deoxy-2'-fluorouridine-3'-phosphate
  modified_base 17: mod_base = OTHER; note = 2'-O-methyluridine-3'-phosphate
  modified_base 18: mod_base = OTHER; note = 2'-O-methylcytidine-3'-phosphate
  modified_base 19: mod_base = OTHER; note = 2'-O-methyladenosine-3'-phosphate
  modified_base 20: mod_base = OTHER; note = 2'-O-methylcytidine-3'-phosphate
  modified_base 21: mod_base = OTHER; note = 2'-O-methyluridine-3'-phosphorothioate
  modified_base 22: mod_base = OTHER; note = 2'-O-methyluridine-3'-phosphorothioate
  modified_base 23: mod_base = OTHER; note = 2'-O-methylcytidine
attcattatgcaaatttcacttc

SEQ ID NO: 5992 - RNA, 23 nt, synthetic construct
  source 1..23: mol_type = other RNA
  modified_base 1: mod_base = OTHER; note = 2'-O-methyladenosine-3'-phosphorothioate
  modified_base 2: mod_base = OTHER; note = 2'-deoxy-2'-fluorocytidine-3'-phosphorothioate
  modified_base 3: mod_base = OTHER; note = 2'-O-methyladenosine-3'-phosphate
  modified_base 4: mod_base = OTHER; note = 2'-O-methyladenosine-3'-phosphate
  modified_base 5: mod_base = OTHER; note = 2'-O-methyladenosine-3'-phosphate
  modified_base 6: mod_base = OTHER; note = 2'-deoxy-2'-fluoroadenosine-3'-phosphate
  modified_base 7: mod_base = OTHER; note = 2'-O-methylguanosine-3'-phosphate
  modified_base 8: mod_base = OTHER; note = 2'-deoxy-2'-fluoroadenosine-3'-phosphate
  modified_base 9: mod_base = OTHER; note = 2'-deoxy-2'-fluorocytidine-3'-phosphate
  modified_base 10: mod_base = OTHER; note = 2'-O-methyluridine-3'-phosphate
  modified_base 11: mod_base = OTHER; note = 2'-O-methyluridine-3'-phosphate
  modified_base 12: mod_base = OTHER; note = 2'-O-methyluridine-3'-phosphate
  modified_base 13: mod_base = OTHER; note = 2'-O-methyluridine-3'-phosphate
  modified_base 14: mod_base = OTHER; note = 2'-deoxy-2'-fluoroadenosine-3'-phosphate
  modified_base 15: mod_base = OTHER; note = 2'-O-methyluridine-3'-phosphate
  modified_base 16: mod_base = OTHER; note = 2'-deoxy-2'-fluorouridine-3'-phosphate
  modified_base 17: mod_base = OTHER; note = 2'-O-methyluridine-3'-phosphate
  modified_base 18: mod_base = OTHER; note = 2'-O-methylcytidine-3'-phosphate
  modified_base 19: mod_base = OTHER; note = 2'-O-methylcytidine-3'-phosphate
  modified_base 20: mod_base = OTHER; note = 2'-O-methylcytidine-3'-phosphate
  modified_base 21: mod_base = OTHER; note = 2'-O-methyluridine-3'-phosphorothioate
  modified_base 22: mod_base = OTHER; note = 2'-O-methyluridine-3'-phosphorothioate
  modified_base 23: mod_base = OTHER; note = 2'-O-methyluridine
acaaaagacttttatttcccttt

SEQ ID NO: 5993 - RNA, 23 nt, synthetic construct
  source 1..23: mol_type = other RNA
  modified_base 1: mod_base = OTHER; note = 2'-O-methyladenosine-3'-phosphorothioate
  modified_base 2: mod_base = OTHER; note = 2'-deoxy-2'-fluoroguanosine-3'-phosphorothioate
  modified_base 3: mod_base = OTHER; note = 2'-O-methyladenosine-3'-phosphate
  modified_base 4: mod_base = OTHER; note = 2'-O-methyladenosine-3'-phosphate
  modified_base 5: mod_base = OTHER; note = 2'-O-methylguanosine-3'-phosphate
  modified_base 6: mod_base = OTHER; note = 2'-deoxy-2'-fluoroadenosine-3'-phosphate
  modified_base 7: mod_base = OTHER; note = 2'-O-methyluridine-3'-phosphate
  modified_base 8: mod_base = OTHER; note = 2'-deoxy-2'-fluoroguanosine-3'-phosphate
  modified_base 9: mod_base = OTHER; note = 2'-deoxy-2'-fluoroadenosine-3'-phosphate
  modified_base 10: mod_base = OTHER; note = 2'-O-methyluridine-3'-phosphate
  modified_base 11: mod_base = OTHER; note = 2'-O-methylcytidine-3'-phosphate
  modified_base 12: mod_base = OTHER; note = 2'-O-methyladenosine-3'-phosphate
  modified_base 13: mod_base = OTHER; note = 2'-O-methyladenosine-3'-phosphate
  modified_base 14: mod_base = OTHER; note = 2'-deoxy-2'-fluoroadenosine-3'-phosphate
  modified_base 15: mod_base = OTHER; note = 2'-O-methyladenosine-3'-phosphate
  modified_base 16: mod_base = OTHER; note = 2'-deoxy-2'-fluoroguanosine-3'-phosphate
  modified_base 17: mod_base = OTHER; note = 2'-O-methyluridine-3'-phosphate
  modified_base 18: mod_base = OTHER; note = 2'-O-methylguanosine-3'-phosphate
  modified_base 19: mod_base = OTHER; note = 2'-O-methylcytidine-3'-phosphate
  modified_base 20: mod_base = OTHER; note = 2'-O-methyluridine-3'-phosphate
  modified_base 21: mod_base = OTHER; note = 2'-O-methyladenosine-3'-phosphorothioate
  modified_base 22: mod_base = OTHER; note = 2'-O-methylguanosine-3'-phosphorothioate
  modified_base 23: mod_base = OTHER; note = 2'-O-methyluridine
agaagatgatcaaaagtgctagt

SEQ ID NO: 5994 - RNA, 23 nt, synthetic construct
  source 1..23: mol_type = other RNA
  modified_base 1: mod_base = OTHER; note = 2'-O-methyladenosine-3'-phosphorothioate
  modified_base 2: mod_base = OTHER; note = 2'-deoxy-2'-fluoroadenosine-3'-phosphorothioate
  modified_base 3: mod_base = OTHER; note = 2'-O-methyladenosine-3'-phosphate
  modified_base 4: mod_base = OTHER; note = 2'-O-methylcytidine-3'-phosphate
  modified_base 5: mod_base = OTHER; note = 2'-O-methylcytidine-3'-phosphate
  modified_base 6: mod_base = OTHER; note = 2'-deoxy-2'-fluorouridine-3'-phosphate
  modified_base 7: mod_base = OTHER; note = 2'-O-methyluridine-3'-phosphate
  modified_base 8: mod_base = OTHER; note = 2'-deoxy-2'-fluorouridine-3'-phosphate
  modified_base 9: mod_base = OTHER; note = 2'-deoxy-2'-fluoroadenosine-3'-phosphate
  modified_base 10: mod_base = OTHER; note = 2'-O-methyladenosine-3'-phosphate
  modified_base 11: mod_base = OTHER; note = 2'-O-methyladenosine-3'-phosphate
  modified_base 12: mod_base = OTHER; note = 2'-O-methyladenosine-3'-phosphate
  modified_base 13: mod_base = OTHER; note = 2'-O-methyluridine-3'-phosphate
  modified_base 14: mod_base = OTHER; note = 2'-deoxy-2'-fluorocytidine-3'-phosphate
  modified_base 15: mod_base = OTHER; note = 2'-O-methyluridine-3'-phosphate
  modified_base 16: mod_base = OTHER; note = 2'-deoxy-2'-fluorouridine-3'-phosphate
  modified_base 17: mod_base = OTHER; note = 2'-O-methylguanosine-3'-phosphate
  modified_base 18: mod_base = OTHER; note = 2'-O-methyladenosine-3'-phosphate
  modified_base 19: mod_base = OTHER; note = 2'-O-methylcytidine-3'-phosphate
  modified_base 20: mod_base = OTHER; note = 2'-O-methyladenosine-3'-phosphate
  modified_base 21: mod_base = OTHER; note = 2'-O-methyladenosine-3'-phosphorothioate
  modified_base 22: mod_base = OTHER; note = 2'-O-methylcytidine-3'-phosphorothioate
  modified_base 23: mod_base = OTHER; note = 2'-O-methyladenosine
aaacctttaaaatcttgacaaca

SEQ ID NO: 5995 - RNA, 23 nt, synthetic construct
  source 1..23: mol_type = other RNA
  modified_base 1: mod_base = OTHER; note = 2'-O-methyladenosine-3'-phosphorothioate
  modified_base 2: mod_base = OTHER; note = 2'-deoxy-2'-fluorocytidine-3'-phosphorothioate
  modified_base 3: mod_base = OTHER; note = 2'-O-methyluridine-3'-phosphate
  modified_base 4: mod_base = OTHER; note = 2'-O-methyluridine-3'-phosphate
  modified_base 5: mod_base = OTHER; note = 2'-O-methyladenosine-3'-phosphate
  modified_base 6: mod_base = OTHER; note = 2'-deoxy-2'-fluoroadenosine-3'-phosphate
  modified_base 7: mod_base = OTHER; note = 2'-O-methylguanosine-3'-phosphate
  modified_base 8: mod_base = OTHER; note = 2'-deoxy-2'-fluorocytidine-3'-phosphate
  modified_base 9: mod_base = OTHER; note = 2'-deoxy-2'-fluoroadenosine-3'-phosphate
  modified_base 10: mod_base = OTHER; note = 2'-O-methylguanosine-3'-phosphate
  modified_base 11: mod_base = OTHER; note = 2'-O-methyladenosine-3'-phosphate
  modified_base 12: mod_base = OTHER; note = 2'-O-methyladenosine-3'-phosphate
  modified_base 13: mod_base = OTHER; note = 2'-O-methyluridine-3'-phosphate
  modified_base 14: mod_base = OTHER; note = 2'-deoxy-2'-fluorouridine-3'-phosphate
  modified_base 15: mod_base = OTHER; note = 2'-O-methyladenosine-3'-phosphate
  modified_base 16: mod_base = OTHER; note = 2'-deoxy-2'-fluorouridine-3'-phosphate
  modified_base 17: mod_base = OTHER; note = 2'-O-methyladenosine-3'-phosphate
  modified_base 18: mod_base = OTHER; note = 2'-O-methyladenosine-3'-phosphate
  modified_base 19: mod_base = OTHER; note = 2'-O-methyladenosine-3'-phosphate
  modified_base 20: mod_base = OTHER; note = 2'-O-methylcytidine-3'-phosphate
  modified_base 21: mod_base = OTHER; note = 2'-O-methylcytidine-3'-phosphorothioate
  modified_base 22: mod_base = OTHER; note = 2'-O-methyluridine-3'-phosphorothioate
  modified_base 23: mod_base = OTHER; note = 2'-O-methyluridine
acttaagcagaattataaacctt

SEQ ID NO: 5996 - RNA, 23 nt, synthetic construct
  source 1..23: mol_type = other RNA
  modified_base 1: mod_base = OTHER; note = 2'-O-methyladenosine-3'-phosphorothioate
  modified_base 2: mod_base = OTHER; note = 2'-deoxy-2'-fluorouridine-3'-phosphorothioate
  modified_base 3: mod_base = OTHER; note = 2'-O-methyladenosine-3'-phosphate
  modified_base 4: mod_base = OTHER; note = 2'-O-methyladenosine-3'-phosphate
  modified_base 5: mod_base = OTHER; note = 2'-O-methylguanosine-3'-phosphate
  modified_base 6: mod_base = OTHER; note = 2'-deoxy-2'-fluorouridine-3'-phosphate
  modified_base 7: mod_base = OTHER; note = 2'-O-methylcytidine-3'-phosphate
  modified_base 8: mod_base = OTHER; note = 2'-deoxy-2'-fluorocytidine-3'-phosphate
  modified_base 9: mod_base = OTHER; note = 2'-deoxy-2'-fluoroadenosine-3'-phosphate
  modified_base 10: mod_base = OTHER; note = 2'-O-methyladenosine-3'-phosphate
  modified_base 11: mod_base = OTHER; note = 2'-O-methyladenosine-3'-phosphate
  modified_base 12: mod_base = OTHER; note = 2'-O-methylcytidine-3'-phosphate
  modified_base 13: mod_base = OTHER; note = 2'-O-methyluridine-3'-phosphate
  modified_base 14: mod_base = OTHER; note = 2'-deoxy-2'-fluoroadenosine-3'-phosphate
  modified_base 15: mod_base = OTHER; note = 2'-O-methylguanosine-3'-phosphate
  modified_base 16: mod_base = OTHER; note = 2'-deoxy-2'-fluoroadenosine-3'-phosphate
  modified_base 17: mod_base = OTHER; note = 2'-O-methylguanosine-3'-phosphate
  modified_base 18: mod_base = OTHER; note = 2'-O-methylcytidine-3'-phosphate
  modified_base 19: mod_base = OTHER; note = 2'-O-methyluridine-3'-phosphate
  modified_base 20: mod_base = OTHER; note = 2'-O-methyluridine-3'-phosphate
  modified_base 21: mod_base = OTHER; note = 2'-O-methyladenosine-3'-phosphorothioate
  modified_base 22: mod_base = OTHER; note = 2'-O-methyladenosine-3'-phosphorothioate
  modified_base 23: mod_base = OTHER; note = 2'-O-methylguanosine
ataagtccaaactagagcttaag

SEQ ID NO: 5997 - RNA, 23 nt, synthetic construct
  source 1..23: mol_type = other RNA
  modified_base 1: mod_base = OTHER; note = 2'-O-methyladenosine-3'-phosphorothioate
  modified_base 2: mod_base = OTHER; note = 2'-deoxy-2'-fluorocytidine-3'-phosphorothioate
  modified_base 3: mod_base = OTHER; note = 2'-O-methyladenosine-3'-phosphate
  modified_base 4: mod_base = OTHER; note = 2'-O-methyluridine-3'-phosphate
  modified_base 5: mod_base = OTHER; note = 2'-O-methyladenosine-3'-phosphate
  modified_base 6: mod_base = OTHER; note = 2'-deoxy-2'-fluoroguanosine-3'-phosphate
  modified_base 7: mod_base = OTHER; note = 2'-O-methyluridine-3'-phosphate
  modified_base 8: mod_base = OTHER; note = 2'-deoxy-2'-fluorouridine-3'-phosphate
  modified_base 9: mod_base = OTHER; note = 2'-deoxy-2'-fluoroadenosine-3'-phosphate
  modified_base 10: mod_base = OTHER; note = 2'-O-methylguanosine-3'-phosphate
  modified_base 11: mod_base = OTHER; note = 2'-O-methylguanosine-3'-phosphate
  modified_base 12: mod_base = OTHER; note = 2'-O-methyladenosine-3'-phosphate
  modified_base 13: mod_base = OTHER; note = 2'-O-methyluridine-3'-phosphate
  modified_base 14: mod_base = OTHER; note = 2'-deoxy-2'-fluoroadenosine-3'-phosphate
  modified_base 15: mod_base = OTHER; note = 2'-O-methylcytidine-3'-phosphate
  modified_base 16: mod_base = OTHER; note = 2'-deoxy-2'-fluorocytidine-3'-phosphate
  modified_base 17: mod_base = OTHER; note = 2'-O-methyluridine-3'-phosphate
  modified_base 18: mod_base = OTHER; note = 2'-O-methyladenosine-3'-phosphate
  modified_base 19: mod_base = OTHER; note = 2'-O-methyladenosine-3'-phosphate
  modified_base 20: mod_base = OTHER; note = 2'-O-methylguanosine-3'-phosphate
  modified_base 21: mod_base = OTHER; note = 2'-O-methyluridine-3'-phosphorothioate
  modified_base 22: mod_base = OTHER; note = 2'-O-methylcytidine-3'-phosphorothioate
  modified_base 23: mod_base = OTHER; note = 2'-O-methylcytidine
acatagttaggatacctaagtcc

SEQ ID NO: 5998 - RNA, 23 nt, synthetic construct
  source 1..23: mol_type = other RNA
  modified_base 1: mod_base = OTHER; note = 2'-O-methyladenosine-3'-phosphorothioate
  modified_base 2: mod_base = OTHER; note = 2'-deoxy-2'-fluorouridine-3'-phosphorothioate
  modified_base 3: mod_base = OTHER; note = 2'-O-methyluridine-3'-phosphate
  modified_base 4: mod_base = OTHER; note = 2'-O-methyluridine-3'-phosphate
  modified_base 5: mod_base = OTHER; note = 2'-O-methyladenosine-3'-phosphate
  modified_base 6: mod_base = OTHER; note = 2'-deoxy-2'-fluoroadenosine-3'-phosphate
  modified_base 7: mod_base = OTHER; note = 2'-O-methyladenosine-3'-phosphate
  modified_base 8: mod_base = OTHER; note = 2'-deoxy-2'-fluorocytidine-3'-phosphate
  modified_base 9: mod_base = OTHER; note = 2'-deoxy-2'-fluoroadenosine-3'-phosphate
  modified_base 10: mod_base = OTHER; note = 2'-O-methyladenosine-3'-phosphate
  modified_base 11: mod_base = OTHER; note = 2'-O-methyluridine-3'-phosphate
  modified_base 12: mod_base = OTHER; note = 2'-O-methylguanosine-3'-phosphate
  modified_base 13: mod_base = OTHER; note = 2'-O-methylcytidine-3'-phosphate
  modified_base 14: mod_base = OTHER; note = 2'-deoxy-2'-fluoroadenosine-3'-phosphate
  modified_base 15: mod_base = OTHER; note = 2'-O-methyladenosine-3'-phosphate
  modified_base 16: mod_base = OTHER; note = 2'-deoxy-2'-fluoroadenosine-3'-phosphate
  modified_base 17: mod_base = OTHER; note = 2'-O-methyluridine-3'-phosphate
  modified_base 18: mod_base = OTHER; note = 2'-O-methyladenosine-3'-phosphate
  modified_base 19: mod_base = OTHER; note = 2'-O-methylcytidine-3'-phosphate
  modified_base 20: mod_base = OTHER; note = 2'-O-methylcytidine-3'-phosphate
  modified_base 21: mod_base = OTHER; note = 2'-O-methyluridine-3'-phosphorothioate
  modified_base 22: mod_base = OTHER; note = 2'-O-methylcytidine-3'-phosphorothioate
  modified_base 23: mod_base = OTHER; note = 2'-O-methylcytidine
atttaaacaatgcaaatacctcc

SEQ ID NO: 5999 - RNA, 23 nt, synthetic construct
  source 1..23: mol_type = other RNA
  modified_base 1: mod_base = OTHER; note = 2'-O-methyladenosine-3'-phosphorothioate
  modified_base 2: mod_base = OTHER; note = 2'-deoxy-2'-fluoroguanosine-3'-phosphorothioate
  modified_base 3: mod_base = OTHER; note = 2'-O-methyladenosine-3'-phosphate
  modified_base 4: mod_base = OTHER; note = 2'-O-methylguanosine-3'-phosphate
  modified_base 5: mod_base = OTHER; note = 2'-O-methylguanosine-3'-phosphate
  modified_base 6: mod_base = OTHER; note = 2'-deoxy-2'-fluoroadenosine-3'-phosphate
  modified_base 7: mod_base = OTHER; note = 2'-O-methyladenosine-3'-phosphate
  modified_base 8: mod_base = OTHER; note = 2'-deoxy-2'-fluorocytidine-3'-phosphate
  modified_base 9: mod_base = OTHER; note = 2'-deoxy-2'-fluorouridine-3'-phosphate
  modified_base 10: mod_base = OTHER; note = 2'-O-methyluridine-3'-phosphate
  modified_base 11: mod_base = OTHER; note = 2'-O-methylguanosine-3'-phosphate
  modified_base 12: mod_base = OTHER; note = 2'-O-methylcytidine-3'-phosphate
  modified_base 13: mod_base = OTHER; note = 2'-O-methyluridine-3'-phosphate
  modified_base 14: mod_base = OTHER; note = 2'-deoxy-2'-fluorouridine-3'-phosphate
  modified_base 15: mod_base = OTHER; note = 2'-O-methyluridine-3'-phosphate
  modified_base 16: mod_base = OTHER; note = 2'-deoxy-2'-fluorouridine-3'-phosphate
  modified_base 17: mod_base = OTHER; note = 2'-O-methyladenosine-3'-phosphate
  modified_base 18: mod_base = OTHER; note = 2'-O-methyluridine-3'-phosphate
  modified_base 19: mod_base = OTHER; note = 2'-O-methylcytidine-3'-phosphate
  modified_base 20: mod_base = OTHER; note = 2'-O-methylcytidine-3'-phosphate
  modified_base 21: mod_base = OTHER; note = 2'-O-methyluridine-3'-phosphorothioate
  modified_base 22: mod_base = OTHER; note = 2'-O-methyladenosine-3'-phosphorothioate
  modified_base 23: mod_base = OTHER; note = 2'-O-methyladenosine
agaggaacttgcttttatcctaa

SEQ ID NO: 6000 - RNA, 23 nt, synthetic construct
  source 1..23: mol_type = other RNA
  modified_base 1: mod_base = OTHER; note = 2'-O-methyladenosine-3'-phosphorothioate
  modified_base 2: mod_base = OTHER; note = 2'-deoxy-2'-fluoroguanosine-3'-phosphorothioate
  modified_base 3: mod_base = OTHER; note = 2'-O-methyluridine-3'-phosphate
  modified_base 4: mod_base = OTHER; note = 2'-O-methyladenosine-3'-phosphate
  modified_base 5: mod_base = OTHER; note = 2'-O-methyladenosine-3'-phosphate
  modified_base 6: mod_base = OTHER; note = 2'-deoxy-2'-fluoroguanosine-3'-phosphate
  modified_base 7: mod_base = OTHER; note = 2'-O-methyladenosine-3'-phosphate
  modified_base 8: mod_base = OTHER; note = 2'-deoxy-2'-fluorocytidine-3'-phosphate
  modified_base 9: mod_base = OTHER; note = 2'-deoxy-2'-fluoroguanosine-3'-phosphate
  modified_base 10: mod_base = OTHER; note = 2'-O-methyluridine-3'-phosphate
  modified_base 11: mod_base = OTHER; note = 2'-O-methyluridine-3'-phosphate
  modified_base 12: mod_base = OTHER; note = 2'-O-methylguanosine-3'-phosphate
  modified_base 13: mod_base = OTHER; note = 2'-O-methylcytidine-3'-phosphate
  modified_base 14: mod_base = OTHER; note = 2'-deoxy-2'-fluoroadenosine-3'-phosphate
  modified_base 15: mod_base = OTHER; note = 2'-O-methylguanosine-3'-phosphate
  modified_base 16: mod_base = OTHER; note = 2'-deoxy-2'-fluorouridine-3'-phosphate
  modified_base 17: mod_base = OTHER; note = 2'-O-methylcytidine-3'-phosphate
  modified_base 18: mod_base = OTHER; note = 2'-O-methyladenosine-3'-phosphate
  modified_base 19: mod_base = OTHER; note = 2'-O-methylcytidine-3'-phosphate
  modified_base 20: mod_base = OTHER; note = 2'-O-methyladenosine-3'-phosphate
  modified_base 21: mod_base = OTHER; note = 2'-O-methylguanosine-3'-phosphorothioate
  modified_base 22: mod_base = OTHER; note = 2'-O-methylguanosine-3'-phosphorothioate
  modified_base 23: mod_base = OTHER; note = 2'-O-methyladenosine
agtaagacgttgcagtcacagga

SEQ ID NO: 6001 - RNA, 23 nt, synthetic construct
  source 1..23: mol_type = other RNA
  modified_base 1: mod_base = OTHER; note = 2'-O-methyladenosine-3'-phosphorothioate
  modified_base 2: mod_base = OTHER; note = 2'-deoxy-2'-fluoroadenosine-3'-phosphorothioate
  modified_base 3: mod_base = OTHER; note = 2'-O-methyluridine-3'-phosphate
  modified_base 4: mod_base = OTHER; note = 2'-O-methylcytidine-3'-phosphate
  modified_base 5: mod_base = OTHER; note = 2'-O-methyladenosine-3'-phosphate
  modified_base 6: mod_base = OTHER; note = 2'-deoxy-2'-fluoroadenosine-3'-phosphate
  modified_base 7: mod_base = OTHER; note = 2'-O-methylguanosine-3'-phosphate
  modified_base 8: mod_base = OTHER; note = 2'-deoxy-2'-fluorouridine-3'-phosphate
  modified_base 9: mod_base = OTHER; note = 2'-deoxy-2'-fluorouridine-3'-phosphate
  modified_base 10: mod_base = OTHER; note = 2'-O-methylguanosine-3'-phosphate
  modified_base 11: mod_base = OTHER; note = 2'-O-methylguanosine-3'-phosphate
  modified_base 12: mod_base = OTHER; note = 2'-O-methyluridine-3'-phosphate
  modified_base 13: mod_base = OTHER; note = 2'-O-methyladenosine-3'-phosphate
  modified_base 14: mod_base = OTHER; note = 2'-deoxy-2'-fluorouridine-3'-phosphate
  modified_base 15: mod_base = OTHER; note = 2'-O-methylcytidine-3'-phosphate
  modified_base 16: mod_base = OTHER; note = 2'-deoxy-2'-fluorocytidine-3'-phosphate
  modified_base 17: mod_base = OTHER; note = 2'-O-methyluridine-3'-phosphate
  modified_base 18: mod_base = OTHER; note = 2'-O-methylcytidine-3'-phosphate
  modified_base 19: mod_base = OTHER; note = 2'-O-methylcytidine-3'-phosphate
  modified_base 20: mod_base = OTHER; note = 2'-O-methyluridine-3'-phosphate
  modified_base 21: mod_base = OTHER; note = 2'-O-methylguanosine-3'-phosphorothioate
  modified_base 22: mod_base = OTHER; note = 2'-O-methylguanosine-3'-phosphorothioate
  modified_base 23: mod_base = OTHER; note = 2'-O-methylcytidine
aatcaagttggtatcctcctggc

SEQ ID NO: 6002 - RNA, 23 nt, synthetic construct
  source 1..23: mol_type = other RNA
  modified_base 1: mod_base = OTHER; note = 2'-O-methyladenosine-3'-phosphorothioate
  modified_base 2: mod_base = OTHER; note = 2'-deoxy-2'-fluoroadenosine-3'-phosphorothioate
  modified_base 3: mod_base = OTHER; note = 2'-O-methylguanosine-3'-phosphate
  modified_base 4: mod_base = OTHER; note = 2'-O-methyladenosine-3'-phosphate
  modified_base 5: mod_base = OTHER; note = 2'-O-methyladenosine-3'-phosphate
  modified_base 6: mod_base = OTHER; note = 2'-deoxy-2'-fluoroadenosine-3'-phosphate
  modified_base 7: mod_base = OTHER; note = 2'-O-methyladenosine-3'-phosphate
  modified_base 8: mod_base = OTHER; note = 2'-deoxy-2'-fluorocytidine-3'-phosphate
  modified_base 9: mod_base = OTHER; note = 2'-deoxy-2'-fluorouridine-3'-phosphate
  modified_base 10: mod_base = OTHER; note = 2'-O-methyladenosine-3'-phosphate
  modified_base 11: mod_base = OTHER; note = 2'-O-methylguanosine-3'-phosphate
  modified_base 12: mod_base = OTHER; note = 2'-O-methylcytidine-3'-phosphate
  modified_base 13: mod_base = OTHER; note = 2'-O-methyluridine-3'-phosphate
  modified_base 14: mod_base = OTHER; note = 2'-deoxy-2'-fluoroadenosine-3'-phosphate
  modified_base 15: mod_base = OTHER; note = 2'-O-methylguanosine-3'-phosphate
  modified_base 16: mod_base = OTHER; note = 2'-deoxy-2'-fluorouridine-3'-phosphate
  modified_base 17: mod_base = OTHER; note = 2'-O-methylguanosine-3'-phosphate
  modified_base 18: mod_base = OTHER; note = 2'-O-methyladenosine-3'-phosphate
  modified_base 19: mod_base = OTHER; note = 2'-O-methyluridine-3'-phosphate
  modified_base 20: mod_base = OTHER; note = 2'-O-methylguanosine-3'-phosphate
  modified_base 21: mod_base = OTHER; note = 2'-O-methyladenosine-3'-phosphorothioate
  modified_base 22: mod_base = OTHER; note = 2'-O-methyluridine-3'-phosphorothioate
  modified_base 23: mod_base = OTHER; note = 2'-O-methylguanosine
aagaaaactagctagtgatgatg

SEQ ID NO: 6003 - RNA, 23 nt, synthetic construct
  source 1..23: mol_type = other RNA
  modified_base 1: mod_base = OTHER; note = 2'-O-methyladenosine-3'-phosphorothioate
  modified_base 2: mod_base = OTHER; note = 2'-deoxy-2'-fluoroadenosine-3'-phosphorothioate
  modified_base 3: mod_base = OTHER; note = 2'-O-methyladenosine-3'-phosphate
  modified_base 4: mod_base = OTHER; note = 2'-O-methyluridine-3'-phosphate
  modified_base 5: mod_base = OTHER; note = 2'-O-methylguanosine-3'-phosphate
  modified_base 6: mod_base = OTHER; note = 2'-deoxy-2'-fluoroguanosine-3'-phosphate
  modified_base 7: mod_base = OTHER; note = 2'-O-methylcytidine-3'-phosphate
  modified_base 8: mod_base = OTHER; note = 2'-deoxy-2'-fluoroadenosine-3'-phosphate
  modified_base 9: mod_base = OTHER; note = 2'-deoxy-2'-fluoroadenosine-3'-phosphate
  modified_base 10: mod_base = OTHER; note = 2'-O-methyladenosine-3'-phosphate
  modified_base 11: mod_base = OTHER; note = 2'-O-methylcytidine-3'-phosphate
  modified_base 12: mod_base = OTHER; note = 2'-O-methyladenosine-3'-phosphate
  modified_base 13: mod_base = OTHER; note = 2'-O-methyluridine-3'-phosphate
  modified_base 14: mod_base = OTHER; note = 2'-deoxy-2'-fluorouridine-3'-phosphate
  modified_base 15: mod_base = OTHER; note = 2'-O-methyluridine-3'-phosphate
  modified_base 16: mod_base = OTHER; note = 2'-deoxy-2'-fluoroguanosine-3'-phosphate
  modified_base 17: mod_base = OTHER; note = 2'-O-methyluridine-3'-phosphate
  modified_base 18: mod_base = OTHER; note = 2'-O-methyladenosine-3'-phosphate
  modified_base 19: mod_base = OTHER; note = 2'-O-methyladenosine-3'-phosphate
  modified_base 20: mod_base = OTHER; note = 2'-O-methylguanosine-3'-phosphate
  modified_base 21: mod_base = OTHER; note = 2'-O-methylcytidine-3'-phosphorothioate
  modified_base 22: mod_base = OTHER; note = 2'-O-methylcytidine-3'-phosphorothioate
  modified_base 23: mod_base = OTHER; note = 2'-O-methyluridine
aaatggcaaacatttgtaagcct

SEQ ID NO: 6004 - RNA, 23 nt, synthetic construct
  source 1..23: mol_type = other RNA
  modified_base 1: mod_base = OTHER; note = 2'-O-methyladenosine-3'-phosphorothioate
  modified_base 2: mod_base = OTHER; note = 2'-deoxy-2'-fluoroadenosine-3'-phosphorothioate
  modified_base 3: mod_base = OTHER; note = 2'-O-methylguanosine-3'-phosphate
  modified_base 4: mod_base = OTHER; note = 2'-O-methyladenosine-3'-phosphate
  modified_base 5: mod_base = OTHER; note = 2'-O-methyluridine-3'-phosphate
  modified_base 6: mod_base = OTHER; note = 2'-deoxy-2'-fluorocytidine-3'-phosphate
  modified_base 7: mod_base = OTHER; note = 2'-O-methyladenosine-3'-phosphate
  modified_base 8: mod_base = OTHER; note = 2'-deoxy-2'-fluoroadenosine-3'-phosphate
  modified_base 9: mod_base = OTHER; note = 2'-deoxy-2'-fluoroguanosine-3'-phosphate
  modified_base 10: mod_base = OTHER; note = 2'-O-methyluridine-3'-phosphate
  modified_base 11: mod_base = OTHER; note = 2'-O-methyluridine-3'-phosphate
  modified_base 12: mod_base = OTHER; note = 2'-O-methylcytidine-3'-phosphate
  modified_base 13: mod_base = OTHER; note = 2'-O-methyladenosine-3'-phosphate
  modified_base 14: mod_base = OTHER; note = 2'-deoxy-2'-fluoroadenosine-3'-phosphate
  modified_base 15: mod_base = OTHER; note = 2'-O-methyladenosine-3'-phosphate
  modified_base 16: mod_base = OTHER; note = 2'-deoxy-2'-fluoroadenosine-3'-phosphate
  modified_base 17: mod_base = OTHER; note = 2'-O-methylcytidine-3'-phosphate
  modified_base 18: mod_base = OTHER; note = 2'-O-methyladenosine-3'-phosphate
  modified_base 19: mod_base = OTHER; note = 2'-O-methylcytidine-3'-phosphate
  modified_base 20: mod_base = OTHER; note = 2'-O-methyluridine-3'-phosphate
  modified_base 21: mod_base = OTHER; note = 2'-O-methyluridine-3'-phosphorothioate
  modified_base 22: mod_base = OTHER; note = 2'-O-methyladenosine-3'-phosphorothioate
  modified_base 23: mod_base = OTHER; note = 2'-O-methyluridine
aagatcaagttcaaaacacttat

SEQ ID NO: 6005 - RNA, 23 nt, synthetic construct
  source 1..23: mol_type = other RNA
  modified_base 1: mod_base = OTHER; note = 2'-O-methyladenosine-3'-phosphorothioate
  modified_base 2: mod_base = OTHER; note = 2'-deoxy-2'-fluoroadenosine-3'-phosphorothioate
  modified_base 3: mod_base = OTHER; note = 2'-O-methylguanosine-3'-phosphate
  modified_base 4: mod_base = OTHER; note = 2'-O-methyladenosine-3'-phosphate
  modified_base 5: mod_base = OTHER; note = 2'-O-methylguanosine-3'-phosphate
  modified_base 6: mod_base = OTHER; note = 2'-deoxy-2'-fluoroadenosine-3'-phosphate
  modified_base 7: mod_base = OTHER; note = 2'-O-methylguanosine-3'-phosphate
  modified_base 8: mod_base = OTHER; note = 2'-deoxy-2'-fluoroadenosine-3'-phosphate
  modified_base 9: mod_base = OTHER; note = 2'-deoxy-2'-fluoroadenosine-3'-phosphate
  modified_base 10: mod_base = OTHER; note = 2'-O-methylguanosine-3'-phosphate
  modified_base 11: mod_base = OTHER; note = 2'-O-methylcytidine-3'-phosphate
  modified_base 12: mod_base = OTHER; note = 2'-O-methyluridine-3'-phosphate
  modified_base 13: mod_base = OTHER; note = 2'-O-methyladenosine-3'-phosphate
  modified_base 14: mod_base = OTHER; note = 2'-deoxy-2'-fluoroadenosine-3'-phosphate
  modified_base 15: mod_base = OTHER; note = 2'-O-methyladenosine-3'-phosphate
  modified_base 16: mod_base = OTHER; note = 2'-deoxy-2'-fluoroadenosine-3'-phosphate
  modified_base 17: mod_base = OTHER; note = 2'-O-methyladenosine-3'-phosphate
  modified_base 18: mod_base = OTHER; note = 2'-O-methyladenosine-3'-phosphate
  modified_base 19: mod_base = OTHER; note = 2'-O-methylguanosine-3'-phosphate
  modified_base 20: mod_base = OTHER; note = 2'-O-methylcytidine-3'-phosphate
  modified_base 21: mod_base = OTHER; note = 2'-O-methyladenosine-3'-phosphorothioate
  modified_base 22: mod_base = OTHER; note = 2'-O-methylcytidine-3'-phosphorothioate
  modified_base 23: mod_base = OTHER; note = 2'-O-methyladenosine
aagagagaagctaaaaaagcaca

SEQ ID NO: 6006 - RNA, 23 nt, synthetic construct
  source 1..23: mol_type = other RNA
  modified_base 1: mod_base = OTHER; note = 2'-O-methyladenosine-3'-phosphorothioate
  modified_base 2: mod_base = OTHER; note = 2'-deoxy-2'-fluorouridine-3'-phosphorothioate
  modified_base 3: mod_base = OTHER; note = 2'-O-methylguanosine-3'-phosphate
  modified_base 4: mod_base = OTHER; note = 2'-O-methyladenosine-3'-phosphate
  modified_base 5: mod_base = OTHER; note = 2'-O-methyluridine-3'-phosphate
  modified_base 6: mod_base = OTHER; note = 2'-deoxy-2'-fluoroadenosine-3'-phosphate
  modified_base 7: mod_base = OTHER; note = 2'-O-methylcytidine-3'-phosphate
  modified_base 8: mod_base = OTHER; note = 2'-deoxy-2'-fluorouridine-3'-phosphate
  modified_base 9: mod_base = OTHER; note = 2'-deoxy-2'-fluorocytidine-3'-phosphate
  modified_base 10: mod_base = OTHER; note = 2'-O-methyluridine-3'-phosphate
  modified_base 11: mod_base = OTHER; note = 2'-O-methylguanosine-3'-phosphate
  modified_base 12: mod_base = OTHER; note = 2'-O-methyladenosine-3'-phosphate
  modified_base 13: mod_base = OTHER; note = 2'-O-methyluridine-3'-phosphate
  modified_base 14: mod_base = OTHER; note = 2'-deoxy-2'-fluorouridine-3'-phosphate
  modified_base 15: mod_base = OTHER; note = 2'-O-methylcytidine-3'-phosphate
  modified_base 16: mod_base = OTHER; note = 2'-deoxy-2'-fluoroadenosine-3'-phosphate
  modified_base 17: mod_base = OTHER; note = 2'-O-methyladenosine-3'-phosphate
  modified_base 18: mod_base = OTHER; note = 2'-O-methylguanosine-3'-phosphate
  modified_base 19: mod_base = OTHER; note = 2'-O-methyladenosine-3'-phosphate
  modified_base 20: mod_base = OTHER; note = 2'-O-methylguanosine-3'-phosphate
  modified_base 21: mod_base = OTHER; note = 2'-O-methyladenosine-3'-phosphorothioate
  modified_base 22: mod_base = OTHER; note = 2'-O-methylguanosine-3'-phosphorothioate
  modified_base 23: mod_base = OTHER; note = 2'-O-methyladenosine
atgatactctgattcaagagaga

SEQ ID NO: 6007 - RNA, 23 nt, synthetic construct
  source 1..23: mol_type = other RNA
  modified_base 1: mod_base = OTHER; note = 2'-O-methyladenosine-3'-phosphorothioate
  modified_base 2: mod_base = OTHER; note = 2'-deoxy-2'-fluoroadenosine-3'-phosphorothioate
  modified_base 3: mod_base = OTHER; note = 2'-O-methyluridine-3'-phosphate
  modified_base 4: mod_base = OTHER; note = 2'-O-methyluridine-3'-phosphate
  modified_base 5: mod_base = OTHER; note = 2'-O-methylcytidine-3'-phosphate
  modified_base 6: mod_base = OTHER; note = 2'-deoxy-2'-fluorouridine-3'-phosphate
  modified_base 7: mod_base = OTHER; note = 2'-O-methyladenosine-3'-phosphate
  modified_base 8: mod_base = OTHER; note = 2'-deoxy-2'-fluoroadenosine-3'-phosphate
  modified_base 9: mod_base = OTHER; note = 2'-deoxy-2'-fluorocytidine-3'-phosphate
  modified_base 10: mod_base = OTHER; note = 2'-O-methyluridine-3'-phosphate
  modified_base 11: mod_base = OTHER; note = 2'-O-methylcytidine-3'-phosphate
  modified_base 12: mod_base = OTHER; note = 2'-O-methylcytidine-3'-phosphate
  modified_base 13: mod_base = OTHER; note = 2'-O-methyluridine-3'-phosphate
  modified_base 14: mod_base = OTHER; note = 2'-deoxy-2'-fluorouridine-3'-phosphate
  modified_base 15: mod_base = OTHER; note = 2'-O-methylguanosine-3'-phosphate
  modified_base 16: mod_base = OTHER; note = 2'-deoxy-2'-fluoroguanosine-3'-phosphate
  modified_base 17: mod_base = OTHER; note = 2'-O-methyladenosine-3'-phosphate
  modified_base 18: mod_base = OTHER; note = 2'-O-methylguanosine-3'-phosphate
  modified_base 19: mod_base = OTHER; note = 2'-O-methylguanosine-3'-phosphate
  modified_base 20: mod_base = OTHER; note = 2'-O-methyladenosine-3'-phosphate
  modified_base 21: mod_base = OTHER; note = 2'-O-methyladenosine-3'-phosphorothioate
  modified_base 22: mod_base = OTHER; note = 2'-O-methylguanosine-3'-phosphorothioate
  modified_base 23: mod_base = OTHER; note = 2'-O-methyladenosine
aattctaactccttggaggaaga

SEQ ID NO: 6008 - RNA, 23 nt, synthetic construct
  source 1..23: mol_type = other RNA
  modified_base 1: mod_base = OTHER; note = 2'-O-methyladenosine-3'-phosphorothioate
  modified_base 2: mod_base = OTHER; note = 2'-deoxy-2'-fluoroguanosine-3'-phosphorothioate
  modified_base 3: mod_base = OTHER; note = 2'-O-methyluridine-3'-phosphate
  modified_base 4: mod_base = OTHER; note = 2'-O-methyluridine-3'-phosphate
  modified_base 5: mod_base = OTHER; note = 2'-O-methyluridine-3'-phosphate
  modified_base 6: mod_base = OTHER; note = 2'-deoxy-2'-fluorouridine-3'-phosphate
  modified_base 7: mod_base = OTHER; note = 2'-O-methyladenosine-3'-phosphate
  modified_base 8: mod_base = OTHER; note = 2'-deoxy-2'-fluoroadenosine-3'-phosphate
  modified_base 9: mod_base = OTHER; note = 2'-deoxy-2'-fluoroadenosine-3'-phosphate
  modified_base 10: mod_base = OTHER; note = 2'-O-methylcytidine-3'-phosphate
  modified_base 11: mod_base = OTHER; note = 2'-O-methyluridine-3'-phosphate
  modified_base 12: mod_base = OTHER; note = 2'-O-methylguanosine-3'-phosphate
  modified_base 13: mod_base = OTHER; note = 2'-O-methylguanosine-3'-phosphate
  modified_base 14: mod_base = OTHER; note = 2'-deoxy-2'-fluoroguanosine-3'-phosphate
  modified_base 15: mod_base = OTHER; note = 2'-O-methyladenosine-3'-phosphate
  modified_base 16: mod_base = OTHER; note = 2'-deoxy-2'-fluoroadenosine-3'-phosphate
  modified_base 17: mod_base = OTHER; note = 2'-O-methyladenosine-3'-phosphate
  modified_base 18: mod_base = OTHER; note = 2'-O-methyluridine-3'-phosphate
  modified_base 19: mod_base = OTHER; note = 2'-O-methyluridine-3'-phosphate
  modified_base 20: mod_base = OTHER; note = 2'-O-methylcytidine-3'-phosphate
  modified_base 21: mod_base = OTHER; note = 2'-O-methyluridine-3'-phosphorothioate
  modified_base 22: mod_base = OTHER; note = 2'-O-methyladenosine-3'-phosphorothioate
  modified_base 23: mod_base = OTHER; note = 2'-O-methyladenosine
agttttaaactgggaaattctaa

SEQ ID NO: 6009 - RNA, 23 nt, synthetic construct
  source 1..23: mol_type = other RNA
  modified_base 1: mod_base = OTHER; note = 2'-O-methyladenosine-3'-phosphorothioate
  modified_base 2: mod_base = OTHER; note = 2'-deoxy-2'-fluorouridine-3'-phosphorothioate
  modified_base 3: mod_base = OTHER; note = 2'-O-methylguanosine-3'-phosphate
  modified_base 4: mod_base = OTHER; note = 2'-O-methyladenosine-3'-phosphate
  modified_base 5: mod_base = OTHER; note = 2'-O-methylguanosine-3'-phosphate
  modified_base 6: mod_base = OTHER; note = 2'-deoxy-2'-fluoroadenosine-3'-phosphate
  modified_base 7: mod_base = OTHER; note = 2'-O-methyladenosine-3'-phosphate
  modified_base 8: mod_base = OTHER; note = 2'-deoxy-2'-fluoroguanosine-3'-phosphate
  modified_base 9: mod_base = OTHER; note = 2'-deoxy-2'-fluorocytidine-3'-phosphate
  modified_base 10: mod_base = OTHER; note = 2'-O-methyladenosine-3'-phosphate
  modified_base 11: mod_base = OTHER; note = 2'-O-methylcytidine-3'-phosphate
  modified_base 12: mod_base = OTHER; note = 2'-O-methyladenosine-3'-phosphate
  modified_base 13: mod_base = OTHER; note = 2'-O-methyladenosine-3'-phosphate
  modified_base 14: mod_base = OTHER; note = 2'-deoxy-2'-fluoroadenosine-3'-phosphate
  modified_base 15: mod_base = OTHER; note = 2'-O-methylguanosine-3'-phosphate
  modified_base 16: mod_base = OTHER; note = 2'-deoxy-2'-fluoroadenosine-3'-phosphate
  modified_base 17: mod_base = OTHER; note = 2'-O-methyladenosine-3'-phosphate
  modified_base 18: mod_base = OTHER; note = 2'-O-methyladenosine-3'-phosphate
  modified_base 19: mod_base = OTHER; note = 2'-O-methyladenosine-3'-phosphate
  modified_base 20: mod_base = OTHER; note = 2'-O-methylcytidine-3'-phosphate
  modified_base 21: mod_base = OTHER; note = 2'-O-methylcytidine-3'-phosphorothioate
  modified_base 22: mod_base = OTHER; note = 2'-O-methyluridine-3'-phosphorothioate
  modified_base 23: mod_base = OTHER; note = 2'-O-methyladenosine
atgagaagcacaaagaaaaccta

SEQ ID NO: 6010 - RNA, 23 nt, synthetic construct
  source 1..23: mol_type = other RNA
  modified_base 1: mod_base = OTHER; note = 2'-O-methyladenosine-3'-phosphorothioate
  modified_base 2: mod_base = OTHER; note = 2'-deoxy-2'-fluoroadenosine-3'-phosphorothioate
  modified_base 3: mod_base = OTHER; note = 2'-O-methyluridine-3'-phosphate
  modified_base 4: mod_base = OTHER; note = 2'-O-methylcytidine-3'-phosphate
  modified_base 5: mod_base = OTHER; note = 2'-O-methyladenosine-3'-phosphate
  modified_base 6: mod_base = OTHER; note = 2'-deoxy-2'-fluoroadenosine-3'-phosphate
  modified_base 7: mod_base = OTHER; note = 2'-O-methylcytidine-3'-phosphate
  modified_base 8: mod_base = OTHER; note = 2'-deoxy-2'-fluoroadenosine-3'-phosphate
  modified_base 9: mod_base = OTHER; note = 2'-deoxy-2'-fluoroadenosine-3'-phosphate
  modified_base 10: mod_base = OTHER; note = 2'-O-methyladenosine-3'-phosphate
  modified_base 11: mod_base = OTHER; note = 2'-O-methylguanosine-3'-phosphate
  modified_base 12: mod_base = OTHER; note = 2'-O-methylguanosine-3'-phosphate
  modified_base 13: mod_base = OTHER; note = 2'-O-methyladenosine-3'-phosphate
  modified_base 14: mod_base = OTHER; note = 2'-deoxy-2'-fluoroadenosine-3'-phosphate
  modified_base 15: mod_base = OTHER; note = 2'-O-methyladenosine-3'-phosphate
  modified_base 16: mod_base = OTHER; note = 2'-deoxy-2'-fluoroadenosine-3'-phosphate
  modified_base 17: mod_base = OTHER; note = 2'-O-methyladenosine-3'-phosphate
  modified_base 18: mod_base = OTHER; note = 2'-O-methyluridine-3'-phosphate
  modified_base 19: mod_base = OTHER; note = 2'-O-methylguanosine-3'-phosphate
  modified_base 20: mod_base = OTHER; note = 2'-O-methyladenosine-3'-phosphate
  modified_base 21: mod_base = OTHER; note = 2'-O-methylguanosine-3'-phosphorothioate
  modified_base 22: mod_base = OTHER; note = 2'-O-methyladenosine-3'-phosphorothioate
  modified_base 23: mod_base = OTHER; note = 2'-O-methyladenosine
aatcaacaaaggaaaaatgagaa

SEQ ID NO: 6011 - RNA, 23 nt, synthetic construct
  source 1..23: mol_type = other RNA
  modified_base 1: mod_base = OTHER; note = 2'-O-methyladenosine-3'-phosphorothioate
  modified_base 2: mod_base = OTHER; note = 2'-deoxy-2'-fluoroguanosine-3'-phosphorothioate
  modified_base 3: mod_base = OTHER; note = 2'-O-methyladenosine-3'-phosphate
  modified_base 4: mod_base = OTHER; note = 2'-O-methyladenosine-3'-phosphate
  modified_base 5: mod_base = OTHER; note = 2'-O-methylguanosine-3'-phosphate
  modified_base 6: mod_base = OTHER; note = 2'-deoxy-2'-fluoroadenosine-3'-phosphate
  modified_base 7: mod_base = OTHER; note = 2'-O-methylguanosine-3'-phosphate
  modified_base 8: mod_base = OTHER; note = 2'-deoxy-2'-fluoroadenosine-3'-phosphate
  modified_base 9: mod_base = OTHER; note = 2'-deoxy-2'-fluoroadenosine-3'-phosphate
  modified_base 10: mod_base = OTHER; note = 2'-O-methylcytidine-3'-phosphate
  modified_base 11: mod_base = OTHER; note = 2'-O-methyladenosine-3'-phosphate
  modified_base 12: mod_base = OTHER; note = 2'-O-methyladenosine-3'-phosphate
  modified_base 13: mod_base = OTHER; note = 2'-O-methyladenosine-3'-phosphate
  modified_base 14: mod_base = OTHER; note = 2'-deoxy-2'-fluoroadenosine-3'-phosphate
  modified_base 15: mod_base = OTHER; note = 2'-O-methyladenosine-3'-phosphate
  modified_base 16: mod_base = OTHER; note = 2'-deoxy-2'-fluorouridine-3'-phosphate
  modified_base 17: mod_base = OTHER; note = 2'-O-methylcytidine-3'-phosphate
  modified_base 18: mod_base = OTHER; note = 2'-O-methyladenosine-3'-phosphate
  modified_base 19: mod_base = OTHER; note = 2'-O-methylcytidine-3'-phosphate
  modified_base 20: mod_base = OTHER; note = 2'-O-methyladenosine-3'-phosphate
  modified_base 21: mod_base = OTHER; note = 2'-O-methylguanosine-3'-phosphorothioate
  modified_base 22: mod_base = OTHER; note = 2'-O-methylguanosine-3'-phosphorothioate
  modified_base 23: mod_base = OTHER; note = 2'-O-methyladenosine
agaagagaacaaaaatcacagga

SEQ ID NO: 6012 - RNA, 23 nt, synthetic construct
  source 1..23: mol_type = other RNA
  modified_base 1: mod_base = OTHER; note = 2'-O-methyladenosine-3'-phosphorothioate
  modified_base 2: mod_base = OTHER; note = 2'-deoxy-2'-fluorouridine-3'-phosphorothioate
  modified_base 3: mod_base = OTHER; note = 2'-O-methylguanosine-3'-phosphate
  modified_base 4: mod_base = OTHER; note = 2'-O-methyluridine-3'-phosphate
  modified_base 5: mod_base = OTHER; note = 2'-O-methyladenosine-3'-phosphate
  modified_base 6: mod_base = OTHER; note = 2'-deoxy-2'-fluoroadenosine-3'-phosphate
  modified_base 7: mod_base = OTHER; note = 2'-O-methyladenosine-3'-phosphate
  modified_base 8: mod_base = OTHER; note = 2'-deoxy-2'-fluoroguanosine-3'-phosphate
  modified_base 9: mod_base = OTHER; note = 2'-deoxy-2'-fluorocytidine-3'-phosphate
  modified_base 10: mod_base = OTHER; note = 2'-O-methyladenosine-3'-phosphate
  modified_base 11: mod_base = OTHER; note = 2'-O-methylcytidine-3'-phosphate
  modified_base 12: mod_base = OTHER; note = 2'-O-methyluridine-3'-phosphate
  modified_base 13: mod_base = OTHER; note = 2'-O-methyluridine-3'-phosphate
  modified_base 14: mod_base = OTHER; note = 2'-deoxy-2'-fluorocytidine-3'-phosphate
  modified_base 15: mod_base = OTHER; note = 2'-O-methyladenosine-3'-phosphate
  modified_base 16: mod_base = OTHER; note = 2'-deoxy-2'-fluoroguanosine-3'-phosphate
  modified_base 17: mod_base = OTHER; note = 2'-O-methylguanosine-3'-phosphate
  modified_base 18: mod_base = OTHER; note = 2'-O-methylguanosine-3'-phosphate
  modified_base 19: mod_base = OTHER; note = 2'-O-methyladenosine-3'-phosphate
  modified_base 20: mod_base = OTHER; note = 2'-O-methyladenosine-3'-phosphate
  modified_base 21: mod_base = OTHER; note = 2'-O-methylguanosine-3'-phosphorothioate
  modified_base 22: mod_base = OTHER; note = 2'-O-methyladenosine-3'-phosphorothioate
  modified_base 23: mod_base = OTHER; note = 2'-O-methylguanosine
atgtaaagcacttcagggaagag

SEQ ID NO: 6013 - RNA, 23 nt, synthetic construct
  source 1..23: mol_type = other RNA
  modified_base 1: mod_base = OTHER; note = 2'-O-methyladenosine-3'-phosphorothioate
  modified_base 2: mod_base = OTHER; note = 2'-deoxy-2'-fluoroguanosine-3'-phosphorothioate
  modified_base 3: mod_base = OTHER; note = 2'-O-methyluridine-3'-phosphate
  modified_base 4: mod_base = OTHER; note = 2'-O-methyluridine-3'-phosphate
  modified_base 5: mod_base = OTHER; note = 2'-O-methyladenosine-3'-phosphate
  modified_base 6: mod_base = OTHER; note = 2'-deoxy-2'-fluoroadenosine-3'-phosphate
  modified_base 7: mod_base = OTHER; note = 2'-O-methyladenosine-3'-phosphate
  modified_base 8: mod_base = OTHER; note = 2'-deoxy-2'-fluoroadenosine-3'-phosphate
  modified_base 9: mod_base = OTHER; note = 2'-deoxy-2'-fluorouridine-3'-phosphate
  modified_base 10: mod_base = OTHER; note = 2'-O-methyladenosine-3'-phosphate
  modified_base 11: mod_base = OTHER; note = 2'-O-methyladenosine-3'-phosphate
  modified_base 12: mod_base = OTHER; note = 2'-O-methylcytidine-3'-phosphate
  modified_base 13: mod_base = OTHER; note = 2'-O-methyladenosine-3'-phosphate
  modified_base 14: mod_base = OTHER; note = 2'-deoxy-2'-fluoroadenosine-3'-phosphate
  modified_base 15: mod_base = OTHER; note = 2'-O-methyluridine-3'-phosphate
  modified_base 16: mod_base = OTHER; note = 2'-deoxy-2'-fluoroguanosine-3'-phosphate
  modified_base 17: mod_base = OTHER; note = 2'-O-methyladenosine-3'-phosphate
  modified_base 18: mod_base = OTHER; note = 2'-O-methyluridine-3'-phosphate
  modified_base 19: mod_base = OTHER; note = 2'-O-methylguanosine-3'-phosphate
  modified_base 20: mod_base = OTHER; note = 2'-O-methylguanosine-3'-phosphate
  modified_base 21: mod_base = OTHER; note = 2'-O-methyladenosine-3'-phosphorothioate
  modified_base 22: mod_base = OTHER; note = 2'-O-methylguanosine-3'-phosphorothioate
  modified_base 23: mod_base = OTHER; note = 2'-O-methyladenosine
agttaaaataacaatgatggaga

SEQ ID NO: 6014 - RNA, 23 nt, synthetic construct
  source 1..23: mol_type = other RNA
  modified_base 1: mod_base = OTHER; note = 2'-O-methyladenosine-3'-phosphorothioate
  modified_base 2: mod_base = OTHER; note = 2'-deoxy-2'-fluorouridine-3'-phosphorothioate
  modified_base 3: mod_base = OTHER; note = 2'-O-methylguanosine-3'-phosphate
  modified_base 4: mod_base = OTHER; note = 2'-O-methyladenosine-3'-phosphate
  modified_base 5: mod_base = OTHER; note = 2'-O-methylguanosine-3'-phosphate
  modified_base 6: mod_base = OTHER; note = 2'-deoxy-2'-fluoroguanosine-3'-phosphate
  modified_base 7: mod_base = OTHER; note = 2'-O-methyladenosine-3'-phosphate
  modified_base 8: mod_base = OTHER; note = 2'-deoxy-2'-fluorocytidine-3'-phosphate
  modified_base 9: mod_base = OTHER; note = 2'-deoxy-2'-fluorouridine-3'-phosphate
  modified_base 10: mod_base = OTHER; note = 2'-O-methylguanosine-3'-phosphate
  modified_base 11: mod_base = OTHER; note = 2'-O-methyluridine-3'-phosphate
  modified_base 12: mod_base = OTHER; note = 2'-O-methylguanosine-3'-phosphate
  modified_base 13: mod_base = OTHER; note = 2'-O-methyladenosine-3'-phosphate
  modified_base 14: mod_base = OTHER; note = 2'-deoxy-2'-fluoroadenosine-3'-phosphate
  modified_base 15: mod_base = OTHER; note = 2'-O-methyluridine-3'-phosphate
  modified_base 16: mod_base = OTHER; note = 2'-deoxy-2'-fluorouridine-3'-phosphate
  modified_base 17: mod_base = OTHER; note = 2'-O-methyladenosine-3'-phosphate
  modified_base 18: mod_base = OTHER; note = 2'-O-methylcytidine-3'-phosphate
  modified_base 19: mod_base = OTHER; note = 2'-O-methyluridine-3'-phosphate
  modified_base 20: mod_base = OTHER; note = 2'-O-methyladenosine-3'-phosphate
  modified_base 21: mod_base = OTHER; note = 2'-O-methyluridine-3'-phosphorothioate
  modified_base 22: mod_base = OTHER; note = 2'-O-methylcytidine-3'-phosphorothioate
  modified_base 23: mod_base = OTHER; note = 2'-O-methylguanosine
atgaggactgtgaattactatcg

SEQ ID NO: 6015 - RNA, 23 nt, synthetic construct
  source 1..23: mol_type = other RNA
  modified_base 1: mod_base = OTHER; note = 2'-O-methyladenosine-3'-phosphorothioate
  modified_base 2: mod_base = OTHER; note = 2'-deoxy-2'-fluorouridine-3'-phosphorothioate
  modified_base 3: mod_base = OTHER; note = 2'-O-methyluridine-3'-phosphate
  modified_base 4: mod_base = OTHER; note = 2'-O-methyladenosine-3'-phosphate
  modified_base 5: mod_base = OTHER; note = 2'-O-methyladenosine-3'-phosphate
  modified_base 6: mod_base = OTHER; note = 2'-deoxy-2'-fluoroadenosine-3'-phosphate
  modified_base 7: mod_base = OTHER; note = 2'-O-methyladenosine-3'-phosphate
  modified_base 8: mod_base = OTHER; note = 2'-deoxy-2'-fluoroadenosine-3'-phosphate
  modified_base 9: mod_base = OTHER; note = 2'-deoxy-2'-fluorouridine-3'-phosphate
  modified_base 10: mod_base = OTHER; note = 2'-O-methyladenosine-3'-phosphate
  modified_base 11: mod_base = OTHER; note = 2'-O-methylguanosine-3'-phosphate
  modified_base 12: mod_base = OTHER; note = 2'-O-methylguanosine-3'-phosphate
  modified_base 13: mod_base = OTHER; note = 2'-O-methylcytidine-3'-phosphate
  modified_base 14: mod_base = OTHER; note = 2'-deoxy-2'-fluorouridine-3'-phosphate
  modified_base 15: mod_base = OTHER; note = 2'-O-methyluridine-3'-phosphate
  modified_base 16: mod_base = OTHER; note = 2'-deoxy-2'-fluorocytidine-3'-phosphate
  modified_base 17: mod_base = OTHER; note = 2'-O-methyluridine-3'-phosphate
  modified_base 18: mod_base = OTHER; note = 2'-O-methylguanosine-3'-phosphate
  modified_base 19: mod_base = OTHER; note = 2'-O-methyladenosine-3'-phosphate
  modified_base 20: mod_base = OTHER; note = 2'-O-methylguanosine-3'-phosphate
  modified_base 21: mod_base = OTHER; note = 2'-O-methylguanosine-3'-phosphorothioate
  modified_base 22: mod_base = OTHER; note = 2'-O-methyladenosine-3'-phosphorothioate
  modified_base 23: mod_base = OTHER; note = 2'-O-methylcytidine
attaaaaataggcttctgaggac

SEQ ID NO: 6016 - RNA, 23 nt, synthetic construct
  source 1..23: mol_type = other RNA
  modified_base 1: mod_base = OTHER; note = 2'-O-methyladenosine-3'-phosphorothioate
  modified_base 2: mod_base = OTHER; note = 2'-deoxy-2'-fluoroguanosine-3'-phosphorothioate
  modified_base 3: mod_base = OTHER; note = 2'-O-methyladenosine-3'-phosphate
  modified_base 4: mod_base = OTHER; note = 2'-O-methylguanosine-3'-phosphate
  modified_base 5: mod_base = OTHER; note = 2'-O-methyladenosine-3'-phosphate
  modified_base 6: mod_base = OTHER; note = 2'-deoxy-2'-fluoroadenosine-3'-phosphate
  modified_base 7: mod_base = OTHER; note = 2'-O-methyladenosine-3'-phosphate
  modified_base 8: mod_base = OTHER; note = 2'-deoxy-2'-fluoroadenosine-3'-phosphate
  modified_base 9: mod_base = OTHER; note = 2'-deoxy-2'-fluoroguanosine-3'-phosphate
  modified_base 10: mod_base = OTHER; note = 2'-O-methyladenosine-3'-phosphate
  modified_base 11: mod_base = OTHER; note = 2'-O-methylguanosine-3'-phosphate
  modified_base 12: mod_base = OTHER; note = 2'-O-methylguanosine-3'-phosphate
  modified_base 13: mod_base = OTHER; note = 2'-O-methyladenosine-3'-phosphate
  modified_base 14: mod_base = OTHER; note = 2'-deoxy-2'-fluoroadenosine-3'-phosphate
  modified_base 15: mod_base = OTHER; note = 2'-O-methylguanosine-3'-phosphate
  modified_base 16: mod_base = OTHER; note = 2'-deoxy-2'-fluoroguanosine-3'-phosphate
  modified_base 17: mod_base = OTHER; note = 2'-O-methylguanosine-3'-phosphate
  modified_base 18: mod_base = OTHER; note = 2'-O-methyluridine-3'-phosphate
  modified_base 19: mod_base = OTHER; note = 2'-O-methyluridine-3'-phosphate
  modified_base 20: mod_base = OTHER; note = 2'-O-methylguanosine-3'-phosphate
  modified_base 21: mod_base = OTHER; note = 2'-O-methyluridine-3'-phosphorothioate
  modified_base 22: mod_base = OTHER; note = 2'-O-methyluridine-3'-phosphorothioate
  modified_base 23: mod_base = OTHER; note = 2'-O-methyluridine
agagaaaagaggaagggttgttt

SEQ ID NO: 6017 - RNA, 23 nt, synthetic construct
  source 1..23: mol_type = other RNA
  modified_base 1: mod_base = OTHER; note = 2'-O-methyladenosine-3'-phosphorothioate
  modified_base 2: mod_base = OTHER; note = 2'-deoxy-2'-fluoroadenosine-3'-phosphorothioate
  modified_base 3: mod_base = OTHER; note = 2'-O-methylcytidine-3'-phosphate
  modified_base 4: mod_base = OTHER; note = 2'-O-methyladenosine-3'-phosphate
  modified_base 5: mod_base = OTHER; note = 2'-O-methylguanosine-3'-phosphate
  modified_base 6: mod_base = OTHER; note = 2'-deoxy-2'-fluoroadenosine-3'-phosphate
  modified_base 7: mod_base = OTHER; note = 2'-O-methylguanosine-3'-phosphate
  modified_base 8: mod_base = OTHER; note = 2'-deoxy-2'-fluoroadenosine-3'-phosphate
  modified_base 9: mod_base = OTHER; note = 2'-deoxy-2'-fluoroguanosine-3'-phosphate
  modified_base 10: mod_base = OTHER; note = 2'-O-methylguanosine-3'-phosphate
  modified_base 11: mod_base = OTHER; note = 2'-O-methyluridine-3'-phosphate
  modified_base 12: mod_base = OTHER; note = 2'-O-methylguanosine-3'-phosphate
  modified_base 13: mod_base = OTHER; note = 2'-O-methyladenosine-3'-phosphate
  modified_base 14: mod_base = OTHER; note = 2'-deoxy-2'-fluoroguanosine-3'-phosphate
  modified_base 15: mod_base = OTHER; note = 2'-O-methyladenosine-3'-phosphate
  modified_base 16: mod_base = OTHER; note = 2'-deoxy-2'-fluorouridine-3'-phosphate
  modified_base 17: mod_base = OTHER; note = 2'-O-methylguanosine-3'-phosphate
  modified_base 18: mod_base = OTHER; note = 2'-O-methyladenosine-3'-phosphate
  modified_base 19: mod_base = OTHER; note = 2'-O-methylguanosine-3'-phosphate
  modified_base 20: mod_base = OTHER; note = 2'-O-methyladenosine-3'-phosphate
  modified_base 21: mod_base = OTHER; note = 2'-O-methylguanosine-3'-phosphorothioate
  modified_base 22: mod_base = OTHER; note = 2'-O-methyladenosine-3'-phosphorothioate
  modified_base 23: mod_base = OTHER; note = 2'-O-methyladenosine
aacagagaggtgagatgagagaa

SEQ ID NO: 6018 - RNA, 23 nt, synthetic construct
  source 1..23: mol_type = other RNA
  modified_base 1: mod_base = OTHER; note = 2'-O-methyladenosine-3'-phosphorothioate
  modified_base 2: mod_base = OTHER; note = 2'-deoxy-2'-fluorouridine-3'-phosphorothioate
  modified_base 3: mod_base = OTHER; note = 2'-O-methylguanosine-3'-phosphate
  modified_base 4: mod_base = OTHER; note = 2'-O-methyladenosine-3'-phosphate
  modified_base 5: mod_base = OTHER; note = 2'-O-methyluridine-3'-phosphate
  modified_base 6: mod_base = OTHER; note = 2'-deoxy-2'-fluorouridine-3'-phosphate
  modified_base 7: mod_base = OTHER; note = 2'-O-methyladenosine-3'-phosphate
  modified_base 8: mod_base = OTHER; note = 2'-deoxy-2'-fluoroguanosine-3'-phosphate
  modified_base 9: mod_base = OTHER; note = 2'-deoxy-2'-fluorouridine-3'-phosphate
  modified_base 10: mod_base = OTHER; note = 2'-O-methyladenosine-3'-phosphate
  modified_base 11: mod_base = OTHER; note = 2'-O-methyladenosine-3'-phosphate
  modified_base 12: mod_base = OTHER; note = 2'-O-methyluridine-3'-phosphate
  modified_base 13: mod_base = OTHER; note = 2'-O-methylcytidine-3'-phosphate
  modified_base 14: mod_base = OTHER; note = 2'-deoxy-2'-fluoroadenosine-3'-phosphate
  modified_base 15: mod_base = OTHER; note = 2'-O-methyladenosine-3'-phosphate
  modified_base 16: mod_base = OTHER; note = 2'-deoxy-2'-fluorocytidine-3'-phosphate
  modified_base 17: mod_base = OTHER; note = 2'-O-methyladenosine-3'-phosphate
  modified_base 18: mod_base = OTHER; note = 2'-O-methylcytidine-3'-phosphate
  modified_base 19: mod_base = OTHER; note = 2'-O-methyladenosine-3'-phosphate
  modified_base 20: mod_base = OTHER; note = 2'-O-methylguanosine-3'-phosphate
  modified_base 21: mod_base = OTHER; note = 2'-O-methyladenosine-3'-phosphorothioate
  modified_base 22: mod_base = OTHER; note = 2'-O-methylguanosine-3'-phosphorothioate
  modified_base 23: mod_base = OTHER; note = 2'-O-methyladenosine
atgattagtaatcaacacagaga

SEQ ID NO: 6019 - RNA, 23 nt, synthetic construct
  source 1..23: mol_type = other RNA
  modified_base 1: mod_base = OTHER; note = 2'-O-methyladenosine-3'-phosphorothioate
  modified_base 2: mod_base = OTHER; note = 2'-deoxy-2'-fluoroadenosine-3'-phosphorothioate
  modified_base 3: mod_base = OTHER; note = 2'-O-methylcytidine-3'-phosphate
  modified_base 4: mod_base = OTHER; note = 2'-O-methyluridine-3'-phosphate
  modified_base 5: mod_base = OTHER; note = 2'-O-methyladenosine-3'-phosphate
  modified_base 6: mod_base = OTHER; note = 2'-deoxy-2'-fluoroguanosine-3'-phosphate
  modified_base 7: mod_base = OTHER; note = 2'-O-methylcytidine-3'-phosphate
  modified_base 8: mod_base = OTHER; note = 2'-deoxy-2'-fluoroadenosine-3'-phosphate
  modified_base 9: mod_base = OTHER; note = 2'-deoxy-2'-fluoroadenosine-3'-phosphate
  modified_base 10: mod_base = OTHER; note = 2'-O-methyluridine-3'-phosphate
  modified_base 11: mod_base = OTHER; note = 2'-O-methyladenosine-3'-phosphate
  modified_base 12: mod_base = OTHER; note = 2'-O-methyladenosine-3'-phosphate
  modified_base 13: mod_base = OTHER; note = 2'-O-methyluridine-3'-phosphate
  modified_base 14: mod_base = OTHER; note = 2'-deoxy-2'-fluoroadenosine-3'-phosphate
  modified_base 15: mod_base = OTHER; note = 2'-O-methyluridine-3'-phosphate
  modified_base 16: mod_base = OTHER; note = 2'-deoxy-2'-fluorocytidine-3'-phosphate
  modified_base 17: mod_base = OTHER; note = 2'-O-methyluridine-3'-phosphate
  modified_base 18: mod_base = OTHER; note = 2'-O-methyladenosine-3'-phosphate
  modified_base 19: mod_base = OTHER; note = 2'-O-methyladenosine-3'-phosphate
  modified_base 20: mod_base = OTHER; note = 2'-O-methylguanosine-3'-phosphate
  modified_base 21: mod_base = OTHER; note = 2'-O-methyladenosine-3'-phosphorothioate
  modified_base 22: mod_base = OTHER; note = 2'-O-methyluridine-3'-phosphorothioate
  modified_base 23: mod_base = OTHER; note = 2'-O-methylguanosine
aactagcaataatatctaagatg

SEQ ID NO: 6020 - RNA, 23 nt, synthetic construct
  source 1..23: mol_type = other RNA
  modified_base 1: mod_base = OTHER; note = 2'-O-methyladenosine-3'-phosphorothioate
  modified_base 2: mod_base = OTHER; note = 2'-deoxy-2'-fluorouridine-3'-phosphorothioate
  modified_base 3: mod_base = OTHER; note = 2'-O-methyladenosine-3'-phosphate
  modified_base 4: mod_base = OTHER; note = 2'-O-methyladenosine-3'-phosphate
  modified_base 5: mod_base = OTHER; note = 2'-O-methyluridine-3'-phosphate
  modified_base 6: mod_base = OTHER; note = 2'-deoxy-2'-fluorouridine-3'-phosphate
  modified_base 7: mod_base = OTHER; note = 2'-O-methyladenosine-3'-phosphate
  modified_base 8: mod_base = OTHER; note = 2'-deoxy-2'-fluorouridine-3'-phosphate
  modified_base 9: mod_base = OTHER; note = 2'-deoxy-2'-fluorocytidine-3'-phosphate
  modified_base 10: mod_base = OTHER; note = 2'-O-methyladenosine-3'-phosphate
  modified_base 11: mod_base = OTHER; note = 2'-O-methylguanosine-3'-phosphate
  modified_base 12: mod_base = OTHER; note = 2'-O-methyladenosine-3'-phosphate
  modified_base 13: mod_base = OTHER; note = 2'-O-methyladenosine-3'-phosphate
  modified_base 14: mod_base = OTHER; note = 2'-deoxy-2'-fluoroadenosine-3'-phosphate
  modified_base 15: mod_base = OTHER; note = 2'-O-methyladenosine-3'-phosphate
  modified_base 16: mod_base = OTHER; note = 2'-deoxy-2'-fluoroguanosine-3'-phosphate
  modified_base 17: mod_base = OTHER; note = 2'-O-methylcytidine-3'-phosphate
  modified_base 18: mod_base = OTHER; note = 2'-O-methyluridine-3'-phosphate
  modified_base 19: mod_base = OTHER; note = 2'-O-methyluridine-3'-phosphate
  modified_base 20: mod_base = OTHER; note = 2'-O-methylcytidine-3'-phosphate
  modified_base 21: mod_base = OTHER; note = 2'-O-methyladenosine-3'-phosphorothioate
  modified_base 22: mod_base = OTHER; note = 2'-O-methyladenosine-3'-phosphorothioate
  modified_base 23: mod_base = OTHER; note = 2'-O-methylcytidine
ataattatcagaaaagcttcaac

SEQ ID NO: 6021 - RNA, 23 nt, synthetic construct
  source 1..23: mol_type = other RNA
  modified_base 1: mod_base = OTHER; note = 2'-O-methyladenosine-3'-phosphorothioate
  modified_base 2: mod_base = OTHER; note = 2'-deoxy-2'-fluoroadenosine-3'-phosphorothioate
  modified_base 3: mod_base = OTHER; note = 2'-O-methyluridine-3'-phosphate
  modified_base 4: mod_base = OTHER; note = 2'-O-methylguanosine-3'-phosphate
  modified_base 5: mod_base = OTHER; note = 2'-O-methylguanosine-3'-phosphate
  modified_base 6: mod_base = OTHER; note = 2'-deoxy-2'-fluorocytidine-3'-phosphate
  modified_base 7: mod_base = OTHER; note = 2'-O-methyluridine-3'-phosphate
  modified_base 8: mod_base = OTHER; note = 2'-deoxy-2'-fluorocytidine-3'-phosphate
  modified_base 9: mod_base = OTHER; note = 2'-deoxy-2'-fluoroadenosine-3'-phosphate
  modified_base 10: mod_base = OTHER; note = 2'-O-methyladenosine-3'-phosphate
  modified_base 11: mod_base = OTHER; note = 2'-O-methyluridine-3'-phosphate
  modified_base 12: mod_base = OTHER; note = 2'-O-methyladenosine-3'-phosphate
  modified_base 13: mod_base = OTHER; note = 2'-O-methyluridine-3'-phosphate
  modified_base 14: mod_base = OTHER; note = 2'-deoxy-2'-fluoroadenosine-3'-phosphate
  modified_base 15: mod_base = OTHER; note = 2'-O-methyluridine-3'-phosphate
  modified_base 16: mod_base = OTHER; note = 2'-deoxy-2'-fluorouridine-3'-phosphate
  modified_base 17: mod_base = OTHER; note = 2'-O-methyluridine-3'-phosphate
  modified_base 18: mod_base = OTHER; note = 2'-O-methyladenosine-3'-phosphate
  modified_base 19: mod_base = OTHER; note = 2'-O-methylcytidine-3'-phosphate
  modified_base 20: mod_base = OTHER; note = 2'-O-methyluridine-3'-phosphate
  modified_base 21: mod_base = OTHER; note = 2'-O-methylguanosine-3'-phosphorothioate
  modified_base 22: mod_base = OTHER; note = 2'-O-methyluridine-3'-phosphorothioate
  modified_base 23: mod_base = OTHER; note = 2'-O-methyladenosine
aatggctcaatatatttactgta

SEQ ID NO: 6022 - RNA, 23 nt, synthetic construct
  source 1..23: mol_type = other RNA
  modified_base 1: mod_base = OTHER; note = 2'-O-methyladenosine-3'-phosphorothioate
  modified_base 2: mod_base = OTHER; note = 2'-deoxy-2'-fluoroadenosine-3'-phosphorothioate
  modified_base 3: mod_base = OTHER; note = 2'-O-methyladenosine-3'-phosphate
  modified_base 4: mod_base = OTHER; note = 2'-O-methyladenosine-3'-phosphate
  modified_base 5: mod_base = OTHER; note = 2'-O-methyladenosine-3'-phosphate
  modified_base 6: mod_base = OTHER; note = 2'-deoxy-2'-fluoroguanosine-3'-phosphate
  modified_base 7: mod_base = OTHER; note = 2'-O-methyladenosine-3'-phosphate
  modified_base 8: mod_base = OTHER; note = 2'-deoxy-2'-fluoroguanosine-3'-phosphate
  modified_base 9: mod_base = OTHER; note = 2'-deoxy-2'-fluoroadenosine-3'-phosphate
  modified_base 10: mod_base = OTHER; note = 2'-O-methyladenosine-3'-phosphate
  modified_base 11: mod_base = OTHER; note = 2'-O-methyladenosine-3'-phosphate
  modified_base 12: mod_base = OTHER; note = 2'-O-methyladenosine-3'-phosphate
  modified_base 13: mod_base = OTHER; note = 2'-O-methyladenosine-3'-phosphate
  modified_base 14: mod_base = OTHER; note = 2'-deoxy-2'-fluorouridine-3'-phosphate
  modified_base 15: mod_base = OTHER; note = 2'-O-methylguanosine-3'-phosphate
  modified_base 16: mod_base = OTHER; note = 2'-deoxy-2'-fluoroadenosine-3'-phosphate
  modified_base 17: mod_base = OTHER; note = 2'-O-methylguanosine-3'-phosphate
  modified_base 18: mod_base = OTHER; note = 2'-O-methylguanosine-3'-phosphate
  modified_base 19: mod_base = OTHER; note = 2'-O-methylcytidine-3'-phosphate
  modified_base 20: mod_base = OTHER; note = 2'-O-methylcytidine-3'-phosphate
  modified_base 21: mod_base = OTHER; note = 2'-O-methyladenosine-3'-phosphorothioate
  modified_base 22: mod_base = OTHER; note = 2'-O-methyluridine-3'-phosphorothioate
  modified_base 23: mod_base = OTHER; note = 2'-O-methyluridine
aaaaagagaaaaatgaggccatt

SEQ ID NO: 6023 - RNA, 23 nt, synthetic construct
  source 1..23: mol_type = other RNA
  modified_base 1: mod_base = OTHER; note = 2'-O-methyladenosine-3'-phosphorothioate
  modified_base 2: mod_base = OTHER; note = 2'-deoxy-2'-fluorocytidine-3'-phosphorothioate
  modified_base 3: mod_base = OTHER; note = 2'-O-methylguanosine-3'-phosphate
  modified_base 4: mod_base = OTHER; note = 2'-O-methyluridine-3'-phosphate
  modified_base 5: mod_base = OTHER; note = 2'-O-methyladenosine-3'-phosphate
  modified_base 6: mod_base = OTHER; note = 2'-deoxy-2'-fluorouridine-3'-phosphate
  modified_base 7: mod_base = OTHER; note = 2'-O-methyladenosine-3'-phosphate
  modified_base 8: mod_base = OTHER; note = 2'-deoxy-2'-fluoroguanosine-3'-phosphate
  modified_base 9: mod_base = OTHER; note = 2'-deoxy-2'-fluorocytidine-3'-phosphate
  modified_base 10: mod_base = OTHER; note = 2'-O-methyluridine-3'-phosphate
  modified_base 11: mod_base = OTHER; note = 2'-O-methylguanosine-3'-phosphate
  modified_base 12: mod_base = OTHER; note = 2'-O-methylcytidine-3'-phosphate
  modified_base 13: mod_base = OTHER; note = 2'-O-methyluridine-3'-phosphate
  modified_base 14: mod_base = OTHER; note = 2'-deoxy-2'-fluorouridine-3'-phosphate
  modified_base 15: mod_base = OTHER; note = 2'-O-methylcytidine-3'-phosphate
  modified_base 16: mod_base = OTHER; note = 2'-deoxy-2'-fluoroadenosine-3'-phosphate
  modified_base 17: mod_base = OTHER; note = 2'-O-methylcytidine-3'-phosphate
  modified_base 18: mod_base = OTHER; note = 2'-O-methyladenosine-3'-phosphate
  modified_base 19: mod_base = OTHER; note = 2'-O-methyladenosine-3'-phosphate
  modified_base 20: mod_base = OTHER; note = 2'-O-methyladenosine-3'-phosphate
  modified_base 21: mod_base = OTHER; note = 2'-O-methyladenosine-3'-phosphorothioate
  modified_base 22: mod_base = OTHER; note = 2'-O-methylguanosine-3'-phosphorothioate
  modified_base 23: mod_base = OTHER; note = 2'-O-methylguanosine
acgtatagctgcttcacaaaagg

SEQ ID NO: 6024 - RNA, 23 nt, synthetic construct
  source 1..23: mol_type = other RNA
  modified_base 1: mod_base = OTHER; note = 2'-O-methyladenosine-3'-phosphorothioate
  modified_base 2: mod_base = OTHER; note = 2'-deoxy-2'-fluorocytidine-3'-phosphorothioate
  modified_base 3: mod_base = OTHER; note = 2'-O-methyluridine-3'-phosphate
  modified_base 4: mod_base = OTHER; note = 2'-O-methyluridine-3'-phosphate
  modified_base 5: mod_base = OTHER; note = 2'-O-methyluridine-3'-phosphate
  modified_base 6: mod_base = OTHER; note = 2'-deoxy-2'-fluoroadenosine-3'-phosphate
  modified_base 7: mod_base = OTHER; note = 2'-O-methyladenosine-3'-phosphate
  modified_base 8: mod_base = OTHER; note = 2'-deoxy-2'-fluoroadenosine-3'-phosphate
  modified_base 9: mod_base = OTHER; note = 2'-deoxy-2'-fluorouridine-3'-phosphate
  modified_base 10: mod_base = OTHER; note = 2'-O-methyladenosine-3'-phosphate
  modified_base 11: mod_base = OTHER; note = 2'-O-methylcytidine-3'-phosphate
  modified_base 12: mod_base = OTHER; note = 2'-O-methyladenosine-3'-phosphate
  modified_base 13: mod_base = OTHER; note = 2'-O-methyluridine-3'-phosphate
  modified_base 14: mod_base = OTHER; note = 2'-deoxy-2'-fluoroguanosine-3'-phosphate
  modified_base 15: mod_base = OTHER; note = 2'-O-methyluridine-3'-phosphate
  modified_base 16: mod_base = OTHER; note = 2'-deoxy-2'-fluoroadenosine-3'-phosphate
  modified_base 17: mod_base = OTHER; note = 2'-O-methyluridine-3'-phosphate
  modified_base 18: mod_base = OTHER; note = 2'-O-methylguanosine-3'-phosphate
  modified_base 19: mod_base = OTHER; note = 2'-O-methylcytidine-3'-phosphate
  modified_base 20: mod_base = OTHER; note = 2'-O-methylcytidine-3'-phosphate
  modified_base 21: mod_base = OTHER; note = 2'-O-methyladenosine-3'-phosphorothioate
  modified_base 22: mod_base = OTHER; note = 2'-O-methylcytidine-3'-phosphorothioate
  modified_base 23: mod_base = OTHER; note = 2'-O-methylguanosine
actttaaatacatgtatgccacg

SEQ ID NO: 6025 - RNA, 23 nt, synthetic construct
  source 1..23: mol_type = other RNA
  modified_base 1: mod_base = OTHER; note = 2'-O-methyladenosine-3'-phosphorothioate
  modified_base 2: mod_base = OTHER; note = 2'-deoxy-2'-fluorouridine-3'-phosphorothioate
  modified_base 3: mod_base = OTHER; note = 2'-O-methylguanosine-3'-phosphate
  modified_base 4: mod_base = OTHER; note = 2'-O-methyluridine-3'-phosphate
  modified_base 5: mod_base = OTHER; note = 2'-O-methyladenosine-3'-phosphate
  modified_base 6: mod_base = OTHER; note = 2'-deoxy-2'-fluoroadenosine-3'-phosphate
  modified_base 7: mod_base = OTHER; note = 2'-O-methyladenosine-3'-phosphate
  modified_base 8: mod_base = OTHER; note = 2'-deoxy-2'-fluoroadenosine-3'-phosphate
  modified_base 9: mod_base = OTHER; note = 2'-deoxy-2'-fluoroadenosine-3'-phosphate
  modified_base 10: mod_base = OTHER; note = 2'-O-methyladenosine-3'-phosphate
  modified_base 11: mod_base = OTHER; note = 2'-O-methyladenosine-3'-phosphate
  modified_base 12: mod_base = OTHER; note = 2'-O-methyladenosine-3'-phosphate
  modified_base 13: mod_base = OTHER; note = 2'-O-methylcytidine-3'-phosphate
  modified_base 14: mod_base = OTHER; note = 2'-deoxy-2'-fluoroadenosine-3'-phosphate
  modified_base 15: mod_base = OTHER; note = 2'-O-methylcytidine-3'-phosphate
  modified_base 16: mod_base = OTHER; note = 2'-deoxy-2'-fluorouridine-3'-phosphate
  modified_base 17: mod_base = OTHER; note = 2'-O-methylcytidine-3'-phosphate
  modified_base 18: mod_base = OTHER; note = 2'-O-methyluridine-3'-phosphate
  modified_base 19: mod_base = OTHER; note = 2'-O-methyladenosine-3'-phosphate
  modified_base 20: mod_base = OTHER; note = 2'-O-methylcytidine-3'-phosphate
  modified_base 21: mod_base = OTHER; note = 2'-O-methyladenosine-3'-phosphorothioate
  modified_base 22: mod_base = OTHER; note = 2'-O-methyluridine-3'-phosphorothioate
  modified_base 23: mod_base = OTHER; note = 2'-O-methylcytidine
atgtaaaaaaaacactctacatc

SEQ ID NO: 6026 - RNA, 23 nt, synthetic construct
  source 1..23: mol_type = other RNA
  modified_base 1: mod_base = OTHER; note = 2'-O-methyladenosine-3'-phosphorothioate
  modified_base 2: mod_base = OTHER; note = 2'-deoxy-2'-fluorocytidine-3'-phosphorothioate
  modified_base 3: mod_base = OTHER; note = 2'-O-methyladenosine-3'-phosphate
  modified_base 4: mod_base = OTHER; note = 2'-O-methyluridine-3'-phosphate
  modified_base 5: mod_base = OTHER; note = 2'-O-methylguanosine-3'-phosphate
  modified_base 6: mod_base = OTHER; note = 2'-deoxy-2'-fluorocytidine-3'-phosphate
  modified_base 7: mod_base = OTHER; note = 2'-O-methyluridine-3'-phosphate
  modified_base 8: mod_base = OTHER; note = 2'-deoxy-2'-fluoroadenosine-3'-phosphate
  modified_base 9: mod_base = OTHER; note = 2'-deoxy-2'-fluoroadenosine-3'-phosphate
  modified_base 10: mod_base = OTHER; note = 2'-O-methylguanosine-3'-phosphate
  modified_base 11: mod_base = OTHER; note = 2'-O-methyluridine-3'-phosphate
  modified_base 12: mod_base = OTHER; note = 2'-O-methyluridine-3'-phosphate
  modified_base 13: mod_base = OTHER; note = 2'-O-methyladenosine-3'-phosphate
  modified_base 14: mod_base = OTHER; note = 2'-deoxy-2'-fluoroadenosine-3'-phosphate
  modified_base 15: mod_base = OTHER; note = 2'-O-methyladenosine-3'-phosphate
  modified_base 16: mod_base = OTHER; note = 2'-deoxy-2'-fluoroadenosine-3'-phosphate
  modified_base 17: mod_base = OTHER; note = 2'-O-methylguanosine-3'-phosphate
  modified_base 18: mod_base = OTHER; note = 2'-O-methyluridine-3'-phosphate
  modified_base 19: mod_base = OTHER; note = 2'-O-methylguanosine-3'-phosphate
  modified_base 20: mod_base = OTHER; note = 2'-O-methyluridine-3'-phosphate
  modified_base 21: mod_base = OTHER; note = 2'-O-methyladenosine-3'-phosphorothioate
  modified_base 22: mod_base = OTHER; note = 2'-O-methyladenosine-3'-phosphorothioate
  modified_base 23: mod_base = OTHER; note = 2'-O-methyladenosine
acatgctaagttaaaagtgtaaa

SEQ ID NO: 6027 - RNA, 23 nt, synthetic construct
  source 1..23: mol_type = other RNA
  modified_base 1: mod_base = OTHER; note = 2'-O-methyladenosine-3'-phosphorothioate
  modified_base 2: mod_base = OTHER; note = 2'-deoxy-2'-fluorocytidine-3'-phosphorothioate
  modified_base 3: mod_base = OTHER; note = 2'-O-methyluridine-3'-phosphate
  modified_base 4: mod_base = OTHER; note = 2'-O-methyladenosine-3'-phosphate
  modified_base 5: mod_base = OTHER; note = 2'-O-methylcytidine-3'-phosphate
  modified_base 6: mod_base = OTHER; note = 2'-deoxy-2'-fluoroadenosine-3'-phosphate
  modified_base 7: mod_base = OTHER; note = 2'-O-methylguanosine-3'-phosphate
  modified_base 8: mod_base = OTHER; note = 2'-deoxy-2'-fluorouridine-3'-phosphate
  modified_base 9: mod_base = OTHER; note = 2'-deoxy-2'-fluoroadenosine-3'-phosphate
  modified_base 10: mod_base = OTHER; note = 2'-O-methyladenosine-3'-phosphate
  modified_base 11: mod_base = OTHER; note = 2'-O-methyluridine-3'-phosphate
  modified_base 12: mod_base = OTHER; note = 2'-O-methyladenosine-3'-phosphate
  modified_base 13: mod_base = OTHER; note = 2'-O-methylcytidine-3'-phosphate
  modified_base 14: mod_base = OTHER; note = 2'-deoxy-2'-fluorouridine-3'-phosphate
  modified_base 15: mod_base = OTHER; note = 2'-O-methyluridine-3'-phosphate
  modified_base 16: mod_base = OTHER; note = 2'-deoxy-2'-fluorocytidine-3'-phosphate
  modified_base 17: mod_base = OTHER; note = 2'-O-methyladenosine-3'-phosphate
  modified_base 18: mod_base = OTHER; note = 2'-O-methyladenosine-3'-phosphate
  modified_base 19: mod_base = OTHER; note = 2'-O-methylcytidine-3'-phosphate
  modified_base 20: mod_base = OTHER; note = 2'-O-methyladenosine-3'-phosphate
  modified_base 21: mod_base = OTHER; note = 2'-O-methylcytidine-3'-phosphorothioate
  modified_base 22: mod_base = OTHER; note = 2'-O-methylcytidine-3'-phosphorothioate
  modified_base 23: mod_base = OTHER; note = 2'-O-methyladenosine
actacagtaatacttcaacacca

SEQ ID NO: 6028 - RNA, 23 nt, synthetic construct
  source 1..23: mol_type = other RNA
  modified_base 1: mod_base = OTHER; note = 2'-O-methyladenosine-3'-phosphorothioate
  modified_base 2: mod_base = OTHER; note = 2'-deoxy-2'-fluoroguanosine-3'-phosphorothioate
  modified_base 3: mod_base = OTHER; note = 2'-O-methylguanosine-3'-phosphate
  modified_base 4: mod_base = OTHER; note = 2'-O-methyladenosine-3'-phosphate
  modified_base 5: mod_base = OTHER; note = 2'-O-methyladenosine-3'-phosphate
  modified_base 6: mod_base = OTHER; note = 2'-deoxy-2'-fluoroguanosine-3'-phosphate
  modified_base 7: mod_base = OTHER; note = 2'-O-methyladenosine-3'-phosphate
  modified_base 8: mod_base = OTHER; note = 2'-deoxy-2'-fluorocytidine-3'-phosphate
  modified_base 9: mod_base = OTHER; note = 2'-deoxy-2'-fluoroadenosine-3'-phosphate
  modified_base 10: mod_base = OTHER; note = 2'-O-methyladenosine-3'-phosphate
  modified_base 11: mod_base = OTHER; note = 2'-O-methyladenosine-3'-phosphate
  modified_base 12: mod_base = OTHER; note = 2'-O-methylcytidine-3'-phosphate
  modified_base 13: mod_base = OTHER; note = 2'-O-methyluridine-3'-phosphate
  modified_base 14: mod_base = OTHER; note = 2'-deoxy-2'-fluorouridine-3'-phosphate
  modified_base 15: mod_base = OTHER; note = 2'-O-methylguanosine-3'-phosphate
  modified_base 16: mod_base = OTHER; note = 2'-deoxy-2'-fluoroadenosine-3'-phosphate
  modified_base 17: mod_base = OTHER; note = 2'-O-methyluridine-3'-phosphate
  modified_base 18: mod_base = OTHER; note = 2'-O-methylcytidine-3'-phosphate
  modified_base 19: mod_base = OTHER; note = 2'-O-methyluridine-3'-phosphate
  modified_base 20: mod_base = OTHER; note = 2'-O-methyladenosine-3'-phosphate
  modified_base 21: mod_base = OTHER; note = 2'-O-methylcytidine-3'-phosphorothioate
  modified_base 22: mod_base = OTHER; note = 2'-O-methyladenosine-3'-phosphorothioate
  modified_base 23: mod_base = OTHER; note = 2'-O-methylguanosine
aggaagacaaacttgatctacag

SEQ ID NO: 6029 - RNA, 23 nt, synthetic construct
  source 1..23: mol_type = other RNA
  modified_base 1: mod_base = OTHER; note = 2'-O-methyladenosine-3'-phosphorothioate
  modified_base 2: mod_base = OTHER; note = 2'-deoxy-2'-fluorocytidine-3'-phosphorothioate
  modified_base 3: mod_base = OTHER; note = 2'-O-methyluridine-3'-phosphate
  modified_base 4: mod_base = OTHER; note = 2'-O-methylcytidine-3'-phosphate
  modified_base 5: mod_base = OTHER; note = 2'-O-methyladenosine-3'-phosphate
  modified_base 6: mod_base = OTHER; note = 2'-deoxy-2'-fluorocytidine-3'-phosphate
  modified_base 7: mod_base = OTHER; note = 2'-O-methyladenosine-3'-phosphate
  modified_base 8: mod_base = OTHER; note = 2'-deoxy-2'-fluorouridine-3'-phosphate
  modified_base 9: mod_base = OTHER; note = 2'-deoxy-2'-fluorocytidine-3'-phosphate
  modified_base 10: mod_base = OTHER; note = 2'-O-methyluridine-3'-phosphate
  modified_base 11: mod_base = OTHER; note = 2'-O-methyluridine-3'-phosphate
  modified_base 12: mod_base = OTHER; note = 2'-O-methyladenosine-3'-phosphate
  modified_base 13: mod_base = OTHER; note = 2'-O-methylguanosine-3'-phosphate
  modified_base 14: mod_base = OTHER; note = 2'-deoxy-2'-fluorouridine-3'-phosphate
  modified_base 15: mod_base = OTHER; note = 2'-O-methylguanosine-3'-phosphate
  modified_base 16: mod_base = OTHER; note = 2'-deoxy-2'-fluorocytidine-3'-phosphate
  modified_base 17: mod_base = OTHER; note = 2'-O-methylguanosine-3'-phosphate
  modified_base 18: mod_base = OTHER; note = 2'-O-methylguanosine-3'-phosphate
  modified_base 19: mod_base = OTHER; note = 2'-O-methyladenosine-3'-phosphate
  modified_base 20: mod_base = OTHER; note = 2'-O-methyladenosine-3'-phosphate
  modified_base 21: mod_base = OTHER; note = 2'-O-methylguanosine-3'-phosphorothioate
  modified_base 22: mod_base = OTHER; note = 2'-O-methyladenosine-3'-phosphorothioate
  modified_base 23: mod_base = OTHER; note = 2'-O-methylcytidine
actcacatcttagtgcggaagac

SEQ ID NO: 6030 - RNA, 23 nt, synthetic construct
  source 1..23: mol_type = other RNA
  modified_base 1: mod_base = OTHER; note = 2'-O-methyladenosine-3'-phosphorothioate
  modified_base 2: mod_base = OTHER; note = 2'-deoxy-2'-fluoroadenosine-3'-phosphorothioate
  modified_base 3: mod_base = OTHER; note = 2'-O-methyladenosine-3'-phosphate
  modified_base 4: mod_base = OTHER; note = 2'-O-methylcytidine-3'-phosphate
  modified_base 5: mod_base = OTHER; note = 2'-O-methyladenosine-3'-phosphate
  modified_base 6: mod_base = OTHER; note = 2'-deoxy-2'-fluoroadenosine-3'-phosphate
  modified_base 7: mod_base = OTHER; note = 2'-O-methyladenosine-3'-phosphate
  modified_base 8: mod_base = OTHER; note = 2'-deoxy-2'-fluorouridine-3'-phosphate
  modified_base 9: mod_base = OTHER; note = 2'-deoxy-2'-fluorocytidine-3'-phosphate
  modified_base 10: mod_base = OTHER; note = 2'-O-methyladenosine-3'-phosphate
  modified_base 11: mod_base = OTHER; note = 2'-O-methylcytidine-3'-phosphate
  modified_base 12: mod_base = OTHER; note = 2'-O-methyladenosine-3'-phosphate
  modified_base 13: mod_base = OTHER; note = 2'-O-methyladenosine-3'-phosphate
  modified_base 14: mod_base = OTHER; note = 2'-deoxy-2'-fluorouridine-3'-phosphate
  modified_base 15: mod_base = OTHER; note = 2'-O-methyluridine-3'-phosphate
  modified_base 16: mod_base = OTHER; note = 2'-deoxy-2'-fluorouridine-3'-phosphate
  modified_base 17: mod_base = OTHER; note = 2'-O-methylcytidine-3'-phosphate
  modified_base 18: mod_base = OTHER; note = 2'-O-methylcytidine-3'-phosphate
  modified_base 19: mod_base = OTHER; note = 2'-O-methyluridine-3'-phosphate
  modified_base 20: mod_base = OTHER; note = 2'-O-methylcytidine-3'-phosphate
  modified_base 21: mod_base = OTHER; note = 2'-O-methyladenosine-3'-phosphorothioate
  modified_base 22: mod_base = OTHER; note = 2'-O-methylcytidine-3'-phosphorothioate
  modified_base 23: mod_base = OTHER; note = 2'-O-methyladenosine
aaacaaatcacaatttcctcaca

SEQ ID NO: 6031 - RNA, 23 nt, synthetic construct
  source 1..23: mol_type = other RNA
  modified_base 1: mod_base = OTHER; note = 2'-O-methyladenosine-3'-phosphorothioate
  modified_base 2: mod_base = OTHER; note = 2'-deoxy-2'-fluoroadenosine-3'-phosphorothioate
  modified_base 3: mod_base = OTHER; note = 2'-O-methyladenosine-3'-phosphate
  modified_base 4: mod_base = OTHER; note = 2'-O-methyladenosine-3'-phosphate
  modified_base 5: mod_base = OTHER; note = 2'-O-methyluridine-3'-phosphate
  modified_base 6: mod_base = OTHER; note = 2'-deoxy-2'-fluoroguanosine-3'-phosphate
  modified_base 7: mod_base = OTHER; note = 2'-O-methyluridine-3'-phosphate
  modified_base 8: mod_base = OTHER; note = 2'-deoxy-2'-fluoroguanosine-3'-phosphate
  modified_base 9: mod_base = OTHER; note = 2'-deoxy-2'-fluorouridine-3'-phosphate
  modified_base 10: mod_base = OTHER; note = 2'-O-methyladenosine-3'-phosphate
  modified_base 11: mod_base = OTHER; note = 2'-O-methyladenosine-3'-phosphate
  modified_base 12: mod_base = OTHER; note = 2'-O-methyluridine-3'-phosphate
  modified_base 13: mod_base = OTHER; note = 2'-O-methyluridine-3'-phosphate
  modified_base 14: mod_base = OTHER; note = 2'-deoxy-2'-fluorocytidine-3'-phosphate
  modified_base 15: mod_base = OTHER; note = 2'-O-methyladenosine-3'-phosphate
  modified_base 16: mod_base = OTHER; note = 2'-deoxy-2'-fluorouridine-3'-phosphate
  modified_base 17: mod_base = OTHER; note = 2'-O-methyluridine-3'-phosphate
  modified_base 18: mod_base = OTHER; note = 2'-O-methyluridine-3'-phosphate
  modified_base 19: mod_base = OTHER; note = 2'-O-methylguanosine-3'-phosphate
  modified_base 20: mod_base = OTHER; note = 2'-O-methyluridine-3'-phosphate
  modified_base 21: mod_base = OTHER; note = 2'-O-methylguanosine-3'-phosphorothioate
  modified_base 22: mod_base = OTHER; note = 2'-O-methylguanosine-3'-phosphorothioate
  modified_base 23: mod_base = OTHER; note = 2'-O-methyluridine
aaaatgtgtaattcatttgtggt

SEQ ID NO: 6032 - RNA, 23 nt, synthetic construct
  source 1..23: mol_type = other RNA
  modified_base 1: mod_base = OTHER; note = 2'-O-methyladenosine-3'-phosphorothioate
  modified_base 2: mod_base = OTHER; note = 2'-deoxy-2'-fluoroadenosine-3'-phosphorothioate
  modified_base 3: mod_base = OTHER; note = 2'-O-methylguanosine-3'-phosphate
  modified_base 4: mod_base = OTHER; note = 2'-O-methyluridine-3'-phosphate
  modified_base 5: mod_base = OTHER; note = 2'-O-methylguanosine-3'-phosphate
  modified_base 6: mod_base = OTHER; note = 2'-deoxy-2'-fluorouridine-3'-phosphate
  modified_base 7: mod_base = OTHER; note = 2'-O-methyluridine-3'-phosphate
  modified_base 8: mod_base = OTHER; note = 2'-deoxy-2'-fluorouridine-3'-phosphate
  modified_base 9: mod_base = OTHER; note = 2'-deoxy-2'-fluorocytidine-3'-phosphate
  modified_base 10: mod_base = OTHER; note = 2'-O-methyladenosine-3'-phosphate
  modified_base 11: mod_base = OTHER; note = 2'-O-methyladenosine-3'-phosphate
  modified_base 12: mod_base = OTHER; note = 2'-O-methyladenosine-3'-phosphate
  modified_base 13: mod_base = OTHER; note = 2'-O-methyladenosine-3'-phosphate
  modified_base 14: mod_base = OTHER; note = 2'-deoxy-2'-fluorouridine-3'-phosphate
  modified_base 15: mod_base = OTHER; note = 2'-O-methylguanosine-3'-phosphate
  modified_base 16: mod_base = OTHER; note = 2'-deoxy-2'-fluoroadenosine-3'-phosphate
  modified_base 17: mod_base = OTHER; note = 2'-O-methyluridine-3'-phosphate
  modified_base 18: mod_base = OTHER; note = 2'-O-methyladenosine-3'-phosphate
  modified_base 19: mod_base = OTHER; note = 2'-O-methylguanosine-3'-phosphate
  modified_base 20: mod_base = OTHER; note = 2'-O-methyladenosine-3'-phosphate
  modified_base 21: mod_base = OTHER; note = 2'-O-methyladenosine-3'-phosphorothioate
  modified_base 22: mod_base = OTHER; note = 2'-O-methylguanosine-3'-phosphorothioate
  modified_base 23: mod_base = OTHER; note = 2'-O-methyladenosine
aagtgtttcaaaatgatagaaga

SEQ ID NO: 6033 - RNA, 23 nt, synthetic construct
  source 1..23: mol_type = other RNA
  modified_base 1: mod_base = OTHER; note = 2'-O-methyladenosine-3'-phosphorothioate
  modified_base 2: mod_base = OTHER; note = 2'-deoxy-2'-fluoroguanosine-3'-phosphorothioate
  modified_base 3: mod_base = OTHER; note = 2'-O-methylcytidine-3'-phosphate
  modified_base 4: mod_base = OTHER; note = 2'-O-methyladenosine-3'-phosphate
  modified_base 5: mod_base = OTHER; note = 2'-O-methyladenosine-3'-phosphate
  modified_base 6: mod_base = OTHER; note = 2'-deoxy-2'-fluoroguanosine-3'-phosphate
  modified_base 7: mod_base = OTHER; note = 2'-O-methyladenosine-3'-phosphate
  modified_base 8: mod_base = OTHER; note = 2'-deoxy-2'-fluoroadenosine-3'-phosphate
  modified_base 9: mod_base = OTHER; note = 2'-deoxy-2'-fluoroadenosine-3'-phosphate
  modified_base 10: mod_base = OTHER; note = 2'-O-methyluridine-3'-phosphate
  modified_base 11: mod_base = OTHER; note = 2'-O-methyladenosine-3'-phosphate
  modified_base 12: mod_base = OTHER; note = 2'-O-methyluridine-3'-phosphate
  modified_base 13: mod_base = OTHER; note = 2'-O-methyladenosine-3'-phosphate
  modified_base 14: mod_base = OTHER; note = 2'-deoxy-2'-fluorouridine-3'-phosphate
  modified_base 15: mod_base = OTHER; note = 2'-O-methyladenosine-3'-phosphate
  modified_base 16: mod_base = OTHER; note = 2'-deoxy-2'-fluorocytidine-3'-phosphate
  modified_base 17: mod_base = OTHER; note = 2'-O-methyladenosine-3'-phosphate
  modified_base 18: mod_base = OTHER; note = 2'-O-methylguanosine-3'-phosphate
  modified_base 19: mod_base = OTHER; note = 2'-O-methyluridine-3'-phosphate
  modified_base 20: mod_base = OTHER; note = 2'-O-methylguanosine-3'-phosphate
  modified_base 21: mod_base = OTHER; note = 2'-O-methyluridine-3'-phosphorothioate
  modified_base 22: mod_base = OTHER; note = 2'-O-methylcytidine-3'-phosphorothioate
  modified_base 23: mod_base = OTHER; note = 2'-O-methylcytidine
agcaagaaatatatacagtgtcc

SEQ ID NO: 6034 - RNA, 23 nt, synthetic construct
  source 1..23: mol_type = other RNA
  modified_base 1: mod_base = OTHER; note = 2'-O-methyladenosine-3'-phosphorothioate
  modified_base 2: mod_base = OTHER; note = 2'-deoxy-2'-fluoroadenosine-3'-phosphorothioate
  modified_base 3: mod_base = OTHER; note = 2'-O-methylguanosine-3'-phosphate
  modified_base 4: mod_base = OTHER; note = 2'-O-methyluridine-3'-phosphate
  modified_base 5: mod_base = OTHER; note = 2'-O-methylcytidine-3'-phosphate
  modified_base 6: mod_base = OTHER; note = 2'-deoxy-2'-fluorocytidine-3'-phosphate
  modified_base 7: mod_base = OTHER; note = 2'-O-methyluridine-3'-phosphate
  modified_base 8: mod_base = OTHER; note = 2'-deoxy-2'-fluorouridine-3'-phosphate
  modified_base 9: mod_base = OTHER; note = 2'-deoxy-2'-fluorouridine-3'-phosphate
  modified_base 10: mod_base = OTHER; note = 2'-O-methyladenosine-3'-phosphate
  modified_base 11: mod_base = OTHER; note = 2'-O-methylcytidine-3'-phosphate
  modified_base 12: mod_base = OTHER; note = 2'-O-methylcytidine-3'-phosphate
  modified_base 13: mod_base = OTHER; note = 2'-O-methyladenosine-3'-phosphate
  modified_base 14: mod_base = OTHER; note = 2'-deoxy-2'-fluorouridine-3'-phosphate
  modified_base 15: mod_base = OTHER; note = 2'-O-methyluridine-3'-phosphate
  modified_base 16: mod_base = OTHER; note = 2'-deoxy-2'-fluoroadenosine-3'-phosphate
  modified_base 17: mod_base = OTHER; note = 2'-O-methyluridine-3'-phosphate
  modified_base 18: mod_base = OTHER; note = 2'-O-methylguanosine-3'-phosphate
  modified_base 19: mod_base = OTHER; note = 2'-O-methylguanosine-3'-phosphate
  modified_base 20: mod_base = OTHER; note = 2'-O-methylcytidine-3'-phosphate
  modified_base 21: mod_base = OTHER; note = 2'-O-methyladenosine-3'-phosphorothioate
  modified_base 22: mod_base = OTHER; note = 2'-O-methyladenosine-3'-phosphorothioate
  modified_base 23: mod_base = OTHER; note = 2'-O-methylguanosine
aagtcctttaccattatggcaag

SEQ ID NO: 6035 - RNA, 23 nt, synthetic construct
  source 1..23: mol_type = other RNA
  modified_base 1: mod_base = OTHER; note = 2'-O-methyladenosine-3'-phosphorothioate
  modified_base 2: mod_base = OTHER; note = 2'-deoxy-2'-fluorocytidine-3'-phosphorothioate
  modified_base 3: mod_base = OTHER; note = 2'-O-methyluridine-3'-phosphate
  modified_base 4: mod_base = OTHER; note = 2'-O-methyluridine-3'-phosphate
  modified_base 5: mod_base = OTHER; note = 2'-O-methyladenosine-3'-phosphate
  modified_base 6: mod_base = OTHER; note = 2'-deoxy-2'-fluoroadenosine-3'-phosphate
  modified_base 7: mod_base = OTHER; note = 2'-O-methyladenosine-3'-phosphate
  modified_base 8: mod_base = OTHER; note = 2'-deoxy-2'-fluorouridine-3'-phosphate
  modified_base 9: mod_base = OTHER; note = 2'-deoxy-2'-fluoroadenosine-3'-phosphate
  modified_base 10: mod_base = OTHER; note = 2'-O-methyluridine-3'-phosphate
  modified_base 11: mod_base = OTHER; note = 2'-O-methyladenosine-3'-phosphate
  modified_base 12: mod_base = OTHER; note = 2'-O-methyluridine-3'-phosphate
  modified_base 13: mod_base = OTHER; note = 2'-O-methylcytidine-3'-phosphate
  modified_base 14: mod_base = OTHER; note = 2'-deoxy-2'-fluoroadenosine-3'-phosphate
  modified_base 15: mod_base = OTHER; note = 2'-O-methyladenosine-3'-phosphate
  modified_base 16: mod_base = OTHER; note = 2'-deoxy-2'-fluorouridine-3'-phosphate
  modified_base 17: mod_base = OTHER; note = 2'-O-methylcytidine-3'-phosphate
  modified_base 18: mod_base = OTHER; note = 2'-O-methyladenosine-3'-phosphate
  modified_base 19: mod_base = OTHER; note = 2'-O-methylguanosine-3'-phosphate
  modified_base 20: mod_base = OTHER; note = 2'-O-methyluridine-3'-phosphate
  modified_base 21: mod_base = OTHER; note = 2'-O-methylcytidine-3'-phosphorothioate
  modified_base 22: mod_base = OTHER; note = 2'-O-methylcytidine-3'-phosphorothioate
  modified_base 23: mod_base = OTHER; note = 2'-O-methyluridine
acttaaatatatcaatcagtcct

SEQ ID NO: 6036 - RNA, 23 nt, synthetic construct
  source 1..23: mol_type = other RNA
  modified_base 1: mod_base = OTHER; note = 2'-O-methyladenosine-3'-phosphorothioate
  modified_base 2: mod_base = OTHER; note = 2'-deoxy-2'-fluorouridine-3'-phosphorothioate
  modified_base 3: mod_base = OTHER; note = 2'-O-methylguanosine-3'-phosphate
  modified_base 4: mod_base = OTHER; note = 2'-O-methyladenosine-3'-phosphate
  modified_base 5: mod_base = OTHER; note = 2'-O-methyladenosine-3'-phosphate
  modified_base 6: mod_base = OTHER; note = 2'-deoxy-2'-fluoroguanosine-3'-phosphate
  modified_base 7: mod_base = OTHER; note = 2'-O-methyladenosine-3'-phosphate
  modified_base 8: mod_base = OTHER; note = 2'-deoxy-2'-fluoroadenosine-3'-phosphate
  modified_base 9: mod_base = OTHER; note = 2'-deoxy-2'-fluoroadenosine-3'-phosphate
  modified_base 10: mod_base = OTHER; note = 2'-O-methyluridine-3'-phosphate
  modified_base 11: mod_base = OTHER; note = 2'-O-methyladenosine-3'-phosphate
  modified_base 12: mod_base = OTHER; note = 2'-O-methyladenosine-3'-phosphate
  modified_base 13: mod_base = OTHER; note = 2'-O-methyladenosine-3'-phosphate
  modified_base 14: mod_base = OTHER; note = 2'-deoxy-2'-fluoroguanosine-3'-phosphate
  modified_base 15: mod_base = OTHER; note = 2'-O-methyladenosine-3'-phosphate
  modified_base 16: mod_base = OTHER; note = 2'-deoxy-2'-fluorouridine-3'-phosphate
  modified_base 17: mod_base = OTHER; note = 2'-O-methylguanosine-3'-phosphate
  modified_base 18: mod_base = OTHER; note = 2'-O-methylguanosine-3'-phosphate
  modified_base 19: mod_base = OTHER; note = 2'-O-methyladenosine-3'-phosphate
  modified_base 20: mod_base = OTHER; note = 2'-O-methylcytidine-3'-phosphate
  modified_base 21: mod_base = OTHER; note = 2'-O-methylguanosine-3'-phosphorothioate
  modified_base 22: mod_base = OTHER; note = 2'-O-methylcytidine-3'-phosphorothioate
  modified_base 23: mod_base = OTHER; note = 2'-O-methyladenosine
atgaagaaataaagatggacgca

SEQ ID NO: 6037 - RNA, 23 nt, synthetic construct
  source 1..23: mol_type = other RNA
  modified_base 1: mod_base = OTHER; note = 2'-O-methyladenosine-3'-phosphorothioate
  modified_base 2: mod_base = OTHER; note = 2'-deoxy-2'-fluoroguanosine-3'-phosphorothioate
  modified_base 3: mod_base = OTHER; note = 2'-O-methyladenosine-3'-phosphate
  modified_base 4: mod_base = OTHER; note = 2'-O-methylcytidine-3'-phosphate
  modified_base 5: mod_base = OTHER; note = 2'-O-methylcytidine-3'-phosphate
  modified_base 6: mod_base = OTHER; note = 2'-deoxy-2'-fluoroadenosine-3'-phosphate
  modified_base 7: mod_base = OTHER; note = 2'-O-methylguanosine-3'-phosphate
  modified_base 8: mod_base = OTHER; note = 2'-deoxy-2'-fluoroadenosine-3'-phosphate
  modified_base 9: mod_base = OTHER; note = 2'-deoxy-2'-fluoroguanosine-3'-phosphate
  modified_base 10: mod_base = OTHER; note = 2'-O-methyluridine-3'-phosphate
  modified_base 11: mod_base = OTHER; note = 2'-O-methyladenosine-3'-phosphate
  modified_base 12: mod_base = OTHER; note = 2'-O-methylguanosine-3'-phosphate
  modified_base 13: mod_base = OTHER; note = 2'-O-methylguanosine-3'-phosphate
  modified_base 14: mod_base = OTHER; note = 2'-deoxy-2'-fluoroadenosine-3'-phosphate
  modified_base 15: mod_base = OTHER; note = 2'-O-methylcytidine-3'-phosphate
  modified_base 16: mod_base = OTHER; note = 2'-deoxy-2'-fluoroadenosine-3'-phosphate
  modified_base 17: mod_base = OTHER; note = 2'-O-methylcytidine-3'-phosphate
  modified_base 18: mod_base = OTHER; note = 2'-O-methyladenosine-3'-phosphate
  modified_base 19: mod_base = OTHER; note = 2'-O-methylcytidine-3'-phosphate
  modified_base 20: mod_base = OTHER; note = 2'-O-methyluridine-3'-phosphate
  modified_base 21: mod_base = OTHER; note = 2'-O-methylguanosine-3'-phosphorothioate
  modified_base 22: mod_base = OTHER; note = 2'-O-methylcytidine-3'-phosphorothioate
  modified_base 23: mod_base = OTHER; note = 2'-O-methylcytidine
agaccagagtaggacacactgcc

SEQ ID NO: 6038 - RNA, 23 nt, synthetic construct
  source 1..23: mol_type = other RNA
  modified_base 1: mod_base = OTHER; note = 2'-O-methyladenosine-3'-phosphorothioate
  modified_base 2: mod_base = OTHER; note = 2'-deoxy-2'-fluoroguanosine-3'-phosphorothioate
  modified_base 3: mod_base = OTHER; note = 2'-O-methyluridine-3'-phosphate
  modified_base 4: mod_base = OTHER; note = 2'-O-methyluridine-3'-phosphate
  modified_base 5: mod_base = OTHER; note = 2'-O-methyladenosine-3'-phosphate
  modified_base 6: mod_base = OTHER; note = 2'-deoxy-2'-fluorouridine-3'-phosphate
  modified_base 7: mod_base = OTHER; note = 2'-O-methylguanosine-3'-phosphate
  modified_base 8: mod_base = OTHER; note = 2'-deoxy-2'-fluorouridine-3'-phosphate
  modified_base 9: mod_base = OTHER; note = 2'-deoxy-2'-fluoroadenosine-3'-phosphate
  modified_base 10: mod_base = OTHER; note = 2'-O-methylcytidine-3'-phosphate
  modified_base 11: mod_base = OTHER; note = 2'-O-methyluridine-3'-phosphate
  modified_base 12: mod_base = OTHER; note = 2'-O-methyladenosine-3'-phosphate
  modified_base 13: mod_base = OTHER; note = 2'-O-methyladenosine-3'-phosphate
  modified_base 14: mod_base = OTHER; note = 2'-deoxy-2'-fluoroadenosine-3'-phosphate
  modified_base 15: mod_base = OTHER; note = 2'-O-methyluridine-3'-phosphate
  modified_base 16: mod_base = OTHER; note = 2'-deoxy-2'-fluoroguanosine-3'-phosphate
  modified_base 17: mod_base = OTHER; note = 2'-O-methyladenosine-3'-phosphate
  modified_base 18: mod_base = OTHER; note = 2'-O-methylguanosine-3'-phosphate
  modified_base 19: mod_base = OTHER; note = 2'-O-methyladenosine-3'-phosphate
  modified_base 20: mod_base = OTHER; note = 2'-O-methylcytidine-3'-phosphate
  modified_base 21: mod_base = OTHER; note = 2'-O-methylcytidine-3'-phosphorothioate
  modified_base 22: mod_base = OTHER; note = 2'-O-methyladenosine-3'-phosphorothioate
  modified_base 23: mod_base = OTHER; note = 2'-O-methylguanosine
agttatgtactaaatgagaccag

SEQ ID NO: 6039 - RNA, 23 nt, synthetic construct
  source 1..23: mol_type = other RNA
  modified_base 1: mod_base = OTHER; note = 2'-O-methyladenosine-3'-phosphorothioate
  modified_base 2: mod_base = OTHER; note = 2'-deoxy-2'-fluorocytidine-3'-phosphorothioate
  modified_base 3: mod_base = OTHER; note = 2'-O-methyladenosine-3'-phosphate
  modified_base 4: mod_base = OTHER; note = 2'-O-methylcytidine-3'-phosphate
  modified_base 5: mod_base = OTHER; note = 2'-O-methylcytidine-3'-phosphate
  modified_base 6: mod_base = OTHER; note = 2'-deoxy-2'-fluoroadenosine-3'-phosphate
  modified_base 7: mod_base = OTHER; note = 2'-O-methyladenosine-3'-phosphate
  modified_base 8: mod_base = OTHER; note = 2'-deoxy-2'-fluoroguanosine-3'-phosphate
  modified_base 9: mod_base = OTHER; note = 2'-deoxy-2'-fluorouridine-3'-phosphate
  modified_base 10: mod_base = OTHER; note = 2'-O-methylguanosine-3'-phosphate
  modified_base 11: mod_base = OTHER; note = 2'-O-methylcytidine-3'-phosphate
  modified_base 12: mod_base = OTHER; note = 2'-O-methyladenosine-3'-phosphate
  modified_base 13: mod_base = OTHER; note = 2'-O-methyladenosine-3'-phosphate
  modified_base 14: mod_base = OTHER; note = 2'-deoxy-2'-fluoroadenosine-3'-phosphate
  modified_base 15: mod_base = OTHER; note = 2'-O-methyluridine-3'-phosphate
  modified_base 16: mod_base = OTHER; note = 2'-deoxy-2'-fluorouridine-3'-phosphate
  modified_base 17: mod_base = OTHER; note = 2'-O-methylguanosine-3'-phosphate
  modified_base 18: mod_base = OTHER; note = 2'-O-methyluridine-3'-phosphate
  modified_base 19: mod_base = OTHER; note = 2'-O-methyluridine-3'-phosphate
  modified_base 20: mod_base = OTHER; note = 2'-O-methyladenosine-3'-phosphate
  modified_base 21: mod_base = OTHER; note = 2'-O-methyluridine-3'-phosphorothioate
  modified_base 22: mod_base = OTHER; note = 2'-O-methylguanosine-3'-phosphorothioate
  modified_base 23: mod_base = OTHER; note = 2'-O-methyluridine
acaccaagtgcaaattgttatgt

SEQ ID NO: 6040 - RNA, 23 nt, synthetic construct
  source 1..23: mol_type = other RNA
  modified_base 1: mod_base = OTHER; note = 2'-O-methyladenosine-3'-phosphorothioate
  modified_base 2: mod_base = OTHER; note = 2'-deoxy-2'-fluorocytidine-3'-phosphorothioate
  modified_base 3: mod_base = OTHER; note = 2'-O-methyluridine-3'-phosphate
  modified_base 4: mod_base = OTHER; note = 2'-O-methylcytidine-3'-phosphate
  modified_base 5: mod_base = OTHER; note = 2'-O-methyladenosine-3'-phosphate
  modified_base 6: mod_base = OTHER; note = 2'-deoxy-2'-fluorocytidine-3'-phosphate
  modified_base 7: mod_base = OTHER; note = 2'-O-methyladenosine-3'-phosphate
  modified_base 8: mod_base = OTHER; note = 2'-deoxy-2'-fluoroguanosine-3'-phosphate
  modified_base 9: mod_base = OTHER; note = 2'-deoxy-2'-fluoroadenosine-3'-phosphate
  modified_base 10: mod_base = OTHER; note = 2'-O-methylguanosine-3'-phosphate
  modified_base 11: mod_base = OTHER; note = 2'-O-methyladenosine-3'-phosphate
  modified_base 12: mod_base = OTHER; note = 2'-O-methyladenosine-3'-phosphate
  modified_base 13: mod_base = OTHER; note = 2'-O-methylcytidine-3'-phosphate
  modified_base 14: mod_base = OTHER; note = 2'-deoxy-2'-fluoroadenosine-3'-phosphate
  modified_base 15: mod_base = OTHER; note = 2'-O-methyladenosine-3'-phosphate
  modified_base 16: mod_base = OTHER; note = 2'-deoxy-2'-fluorouridine-3'-phosphate
  modified_base 17: mod_base = OTHER; note = 2'-O-methyluridine-3'-phosphate
  modified_base 18: mod_base = OTHER; note = 2'-O-methyladenosine-3'-phosphate
  modified_base 19: mod_base = OTHER; note = 2'-O-methyladenosine-3'-phosphate
  modified_base 20: mod_base = OTHER; note = 2'-O-methylcytidine-3'-phosphate
  modified_base 21: mod_base = OTHER; note = 2'-O-methyluridine-3'-phosphorothioate
  modified_base 22: mod_base = OTHER; note = 2'-O-methyluridine-3'-phosphorothioate
  modified_base 23: mod_base = OTHER; note = 2'-O-methylguanosine
actcacagagaacaattaacttg

SEQ ID NO: 6041 - RNA, 23 nt, synthetic construct
  source 1..23: mol_type = other RNA
  modified_base 1: mod_base = OTHER; note = 2'-O-methyladenosine-3'-phosphorothioate
  modified_base 2: mod_base = OTHER; note = 2'-deoxy-2'-fluorocytidine-3'-phosphorothioate
  modified_base 3: mod_base = OTHER; note = 2'-O-methyladenosine-3'-phosphate
  modified_base 4: mod_base = OTHER; note = 2'-O-methylguanosine-3'-phosphate
  modified_base 5: mod_base = OTHER; note = 2'-O-methyladenosine-3'-phosphate
  modified_base 6: mod_base = OTHER; note = 2'-deoxy-2'-fluoroadenosine-3'-phosphate
  modified_base 7: mod_base = OTHER; note = 2'-O-methylguanosine-3'-phosphate
  modified_base 8: mod_base = OTHER; note = 2'-deoxy-2'-fluoroadenosine-3'-phosphate
  modified_base 9: mod_base = OTHER; note = 2'-deoxy-2'-fluoroguanosine-3'-phosphate
  modified_base 10: mod_base = OTHER; note = 2'-O-methyladenosine-3'-phosphate
  modified_base 11: mod_base = OTHER; note = 2'-O-methylcytidine-3'-phosphate
  modified_base 12: mod_base = OTHER; note = 2'-O-methylcytidine-3'-phosphate
  modified_base 13: mod_base = OTHER; note = 2'-O-methyladenosine-3'-phosphate
  modified_base 14: mod_base = OTHER; note = 2'-deoxy-2'-fluorouridine-3'-phosphate
  modified_base 15: mod_base = OTHER; note = 2'-O-methyluridine-3'-phosphate
  modified_base 16: mod_base = OTHER; note = 2'-deoxy-2'-fluoroguanosine-3'-phosphate
  modified_base 17: mod_base = OTHER; note = 2'-O-methyluridine-3'-phosphate
  modified_base 18: mod_base = OTHER; note = 2'-O-methyluridine-3'-phosphate
  modified_base 19: mod_base = OTHER; note = 2'-O-methyluridine-3'-phosphate
  modified_base 20: mod_base = OTHER; note = 2'-O-methyluridine-3'-phosphate
  modified_base 21: mod_base = OTHER; note = 2'-O-methylguanosine-3'-phosphorothioate
  modified_base 22: mod_base = OTHER; note = 2'-O-methylcytidine-3'-phosphorothioate
  modified_base 23: mod_base = OTHER; note = 2'-O-methyluridine
acagaagagaccattgttttgct

SEQ ID NO: 6042 - RNA, 23 nt, synthetic construct
  source 1..23: mol_type = other RNA
  modified_base 1: mod_base = OTHER; note = 2'-O-methyladenosine-3'-phosphorothioate
  modified_base 2: mod_base = OTHER; note = 2'-deoxy-2'-fluorouridine-3'-phosphorothioate
  modified_base 3: mod_base = OTHER; note = 2'-O-methyluridine-3'-phosphate
  modified_base 4: mod_base = OTHER; note = 2'-O-methyladenosine-3'-phosphate
  modified_base 5: mod_base = OTHER; note = 2'-O-methyladenosine-3'-phosphate
  modified_base 6: mod_base = OTHER; note = 2'-deoxy-2'-fluorocytidine-3'-phosphate
  modified_base 7: mod_base = OTHER; note = 2'-O-methyluridine-3'-phosphate
  modified_base 8: mod_base = OTHER; note = 2'-deoxy-2'-fluoroadenosine-3'-phosphate
  modified_base 9: mod_base = OTHER; note = 2'-deoxy-2'-fluorouridine-3'-phosphate
  modified_base 10: mod_base = OTHER; note = 2'-O-methyladenosine-3'-phosphate
  modified_base 11: mod_base = OTHER; note = 2'-O-methyluridine-3'-phosphate
  modified_base 12: mod_base = OTHER; note = 2'-O-methyluridine-3'-phosphate
  modified_base 13: mod_base = OTHER; note = 2'-O-methylguanosine-3'-phosphate
  modified_base 14: mod_base = OTHER; note = 2'-deoxy-2'-fluorouridine-3'-phosphate
  modified_base 15: mod_base = OTHER; note = 2'-O-methyluridine-3'-phosphate
  modified_base 16: mod_base = OTHER; note = 2'-deoxy-2'-fluorocytidine-3'-phosphate
  modified_base 17: mod_base = OTHER; note = 2'-O-methyluridine-3'-phosphate
  modified_base 18: mod_base = OTHER; note = 2'-O-methylcytidine-3'-phosphate
  modified_base 19: mod_base = OTHER; note = 2'-O-methyladenosine-3'-phosphate
  modified_base 20: mod_base = OTHER; note = 2'-O-methylguanosine-3'-phosphate
  modified_base 21: mod_base = OTHER; note = 2'-O-methylcytidine-3'-phosphorothioate
  modified_base 22: mod_base = OTHER; note = 2'-O-methyladenosine-3'-phosphorothioate
  modified_base 23: mod_base = OTHER; note = 2'-O-methyladenosine
attaactatattgttctcagcaa

SEQ ID NO: 6043 - RNA, 23 nt, synthetic construct
  source 1..23: mol_type = other RNA
  modified_base 1: mod_base = OTHER; note = 2'-O-methyladenosine-3'-phosphorothioate
  modified_base 2: mod_base = OTHER; note = 2'-deoxy-2'-fluorouridine-3'-phosphorothioate
  modified_base 3: mod_base = OTHER; note = 2'-O-methyluridine-3'-phosphate
  modified_base 4: mod_base = OTHER; note = 2'-O-methyluridine-3'-phosphate
  modified_base 5: mod_base = OTHER; note = 2'-O-methyladenosine-3'-phosphate
  modified_base 6: mod_base = OTHER; note = 2'-deoxy-2'-fluoroguanosine-3'-phosphate
  modified_base 7: mod_base = OTHER; note = 2'-O-methyladenosine-3'-phosphate
  modified_base 8: mod_base = OTHER; note = 2'-deoxy-2'-fluoroguanosine-3'-phosphate
  modified_base 9: mod_base = OTHER; note = 2'-deoxy-2'-fluoroadenosine-3'-phosphate
  modified_base 10: mod_base = OTHER; note = 2'-O-methyladenosine-3'-phosphate
  modified_base 11: mod_base = OTHER; note = 2'-O-methylguanosine-3'-phosphate
  modified_base 12: mod_base = OTHER; note = 2'-O-methylcytidine-3'-phosphate
  modified_base 13: mod_base = OTHER; note = 2'-O-methyluridine-3'-phosphate
  modified_base 14: mod_base = OTHER; note = 2'-deoxy-2'-fluorouridine-3'-phosphate
  modified_base 15: mod_base = OTHER; note = 2'-O-methyluridine-3'-phosphate
  modified_base 16: mod_base = OTHER; note = 2'-deoxy-2'-fluorouridine-3'-phosphate
  modified_base 17: mod_base = OTHER; note = 2'-O-methyladenosine-3'-phosphate
  modified_base 18: mod_base = OTHER; note = 2'-O-methylguanosine-3'-phosphate
  modified_base 19: mod_base = OTHER; note = 2'-O-methylguanosine-3'-phosphate
  modified_base 20: mod_base = OTHER; note = 2'-O-methyladenosine-3'-phosphate
  modified_base 21: mod_base = OTHER; note = 2'-O-methylguanosine-3'-phosphorothioate
  modified_base 22: mod_base = OTHER; note = 2'-O-methyluridine-3'-phosphorothioate
  modified_base 23: mod_base = OTHER; note = 2'-O-methylcytidine
atttagagaagcttttaggagtc

SEQ ID NO: 6044 - RNA, 23 nt, synthetic construct
  source 1..23: mol_type = other RNA
  modified_base 1: mod_base = OTHER; note = 2'-O-methyladenosine-3'-phosphorothioate
  modified_base 2: mod_base = OTHER; note = 2'-deoxy-2'-fluorocytidine-3'-phosphorothioate
  modified_base 3: mod_base = OTHER; note = 2'-O-methyladenosine-3'-phosphate
  modified_base 4: mod_base = OTHER; note = 2'-O-methyluridine-3'-phosphate
  modified_base 5: mod_base = OTHER; note = 2'-O-methylguanosine-3'-phosphate
  modified_base 6: mod_base = OTHER; note = 2'-deoxy-2'-fluorouridine-3'-phosphate
  modified_base 7: mod_base = OTHER; note = 2'-O-methylguanosine-3'-phosphate
  modified_base 8: mod_base = OTHER; note = 2'-deoxy-2'-fluoroadenosine-3'-phosphate
  modified_base 9: mod_base = OTHER; note = 2'-deoxy-2'-fluoroadenosine-3'-phosphate
  modified_base 10: mod_base = OTHER; note = 2'-O-methylguanosine-3'-phosphate
  modified_base 11: mod_base = OTHER; note = 2'-O-methylguanosine-3'-phosphate
  modified_base 12: mod_base = OTHER; note = 2'-O-methylcytidine-3'-phosphate
  modified_base 13: mod_base = OTHER; note = 2'-O-methyluridine-3'-phosphate
  modified_base 14: mod_base = OTHER; note = 2'-deoxy-2'-fluoroguanosine-3'-phosphate
  modified_base 15: mod_base = OTHER; note = 2'-O-methylguanosine-3'-phosphate
  modified_base 16: mod_base = OTHER; note = 2'-deoxy-2'-fluoroadenosine-3'-phosphate
  modified_base 17: mod_base = OTHER; note = 2'-O-methyluridine-3'-phosphate
  modified_base 18: mod_base = OTHER; note = 2'-O-methyluridine-3'-phosphate
  modified_base 19: mod_base = OTHER; note = 2'-O-methylguanosine-3'-phosphate
  modified_base 20: mod_base = OTHER; note = 2'-O-methylguanosine-3'-phosphate
  modified_base 21: mod_base = OTHER; note = 2'-O-methyladenosine-3'-phosphorothioate
  modified_base 22: mod_base = OTHER; note = 2'-O-methylguanosine-3'-phosphorothioate
  modified_base 23: mod_base = OTHER; note = 2'-O-methylguanosine
acatgtgaaggctggattggagg

SEQ ID NO: 6045 - RNA, 23 nt, synthetic construct
  source 1..23: mol_type = other RNA
  modified_base 1: mod_base = OTHER; note = 2'-O-methyladenosine-3'-phosphorothioate
  modified_base 2: mod_base = OTHER; note = 2'-deoxy-2'-fluoroguanosine-3'-phosphorothioate
  modified_base 3: mod_base = OTHER; note = 2'-O-methyladenosine-3'-phosphate
  modified_base 4: mod_base = OTHER; note = 2'-O-methylcytidine-3'-phosphate
  modified_base 5: mod_base = OTHER; note = 2'-O-methyladenosine-3'-phosphate
  modified_base 6: mod_base = OTHER; note = 2'-deoxy-2'-fluoroguanosine-3'-phosphate
  modified_base 7: mod_base = OTHER; note = 2'-O-methylguanosine-3'-phosphate
  modified_base 8: mod_base = OTHER; note = 2'-deoxy-2'-fluorouridine-3'-phosphate
  modified_base 9: mod_base = OTHER; note = 2'-deoxy-2'-fluorouridine-3'-phosphate
  modified_base 10: mod_base = OTHER; note = 2'-O-methylcytidine-3'-phosphate
  modified_base 11: mod_base = OTHER; note = 2'-O-methylguanosine-3'-phosphate
  modified_base 12: mod_base = OTHER; note = 2'-O-methyluridine-3'-phosphate
  modified_base 13: mod_base = OTHER; note = 2'-O-methyladenosine-3'-phosphate
  modified_base 14: mod_base = OTHER; note = 2'-deoxy-2'-fluorouridine-3'-phosphate
  modified_base 15: mod_base = OTHER; note = 2'-O-methyluridine-3'-phosphate
  modified_base 16: mod_base = OTHER; note = 2'-deoxy-2'-fluoroadenosine-3'-phosphate
  modified_base 17: mod_base = OTHER; note = 2'-O-methyladenosine-3'-phosphate
  modified_base 18: mod_base = OTHER; note = 2'-O-methyladenosine-3'-phosphate
  modified_base 19: mod_base = OTHER; note = 2'-O-methyladenosine-3'-phosphate
  modified_base 20: mod_base = OTHER; note = 2'-O-methyladenosine-3'-phosphate
  modified_base 21: mod_base = OTHER; note = 2'-O-methyladenosine-3'-phosphorothioate
  modified_base 22: mod_base = OTHER; note = 2'-O-methyladenosine-3'-phosphorothioate
  modified_base 23: mod_base = OTHER; note = 2'-O-methyladenosine
agacaggttcgtattaaaaaaaa

SEQ ID NO: 6046 - RNA, 23 nt, synthetic construct
  source 1..23: mol_type = other RNA
  modified_base 1: mod_base = OTHER; note = 2'-O-methyladenosine-3'-phosphorothioate
  modified_base 2: mod_base = OTHER; note = 2'-deoxy-2'-fluoroadenosine-3'-phosphorothioate
  modified_base 3: mod_base = OTHER; note = 2'-O-methyladenosine-3'-phosphate
  modified_base 4: mod_base = OTHER; note = 2'-O-methyluridine-3'-phosphate
  modified_base 5: mod_base = OTHER; note = 2'-O-methylguanosine-3'-phosphate
  modified_base 6: mod_base = OTHER; note = 2'-deoxy-2'-fluoroadenosine-3'-phosphate
  modified_base 7: mod_base = OTHER; note = 2'-O-methyluridine-3'-phosphate
  modified_base 8: mod_base = OTHER; note = 2'-deoxy-2'-fluoroadenosine-3'-phosphate
  modified_base 9: mod_base = OTHER; note = 2'-deoxy-2'-fluoroadenosine-3'-phosphate
  modified_base 10: mod_base = OTHER; note = 2'-O-methylcytidine-3'-phosphate
  modified_base 11: mod_base = OTHER; note = 2'-O-methyladenosine-3'-phosphate
  modified_base 12: mod_base = OTHER; note = 2'-O-methyluridine-3'-phosphate
  modified_base 13: mod_base = OTHER; note = 2'-O-methylcytidine-3'-phosphate
  modified_base 14: mod_base = OTHER; note = 2'-deoxy-2'-fluoroadenosine-3'-phosphate
  modified_base 15: mod_base = OTHER; note = 2'-O-methyladenosine-3'-phosphate
  modified_base 16: mod_base = OTHER; note = 2'-deoxy-2'-fluoroadenosine-3'-phosphate
  modified_base 17: mod_base = OTHER; note = 2'-O-methylguanosine-3'-phosphate
  modified_base 18: mod_base = OTHER; note = 2'-O-methyluridine-3'-phosphate
  modified_base 19: mod_base = OTHER; note = 2'-O-methylguanosine-3'-phosphate
  modified_base 20: mod_base = OTHER; note = 2'-O-methyluridine-3'-phosphate
  modified_base 21: mod_base = OTHER; note = 2'-O-methyluridine-3'-phosphorothioate
  modified_base 22: mod_base = OTHER; note = 2'-O-methyladenosine-3'-phosphorothioate
  modified_base 23: mod_base = OTHER; note = 2'-O-methylcytidine
aaatgataacatcaaagtgttac

SEQ ID NO: 6047 - RNA, 23 nt, synthetic construct
  source 1..23: mol_type = other RNA
  modified_base 1: mod_base = OTHER; note = 2'-O-methyladenosine-3'-phosphorothioate
  modified_base 2: mod_base = OTHER; note = 2'-deoxy-2'-fluoroguanosine-3'-phosphorothioate
  modified_base 3: mod_base = OTHER; note = 2'-O-methyluridine-3'-phosphate
  modified_base 4: mod_base = OTHER; note = 2'-O-methyladenosine-3'-phosphate
  modified_base 5: mod_base = OTHER; note = 2'-O-methyluridine-3'-phosphate
  modified_base 6: mod_base = OTHER; note = 2'-deoxy-2'-fluoroguanosine-3'-phosphate
  modified_base 7: mod_base = OTHER; note = 2'-O-methylcytidine-3'-phosphate
  modified_base 8: mod_base = OTHER; note = 2'-deoxy-2'-fluorouridine-3'-phosphate
  modified_base 9: mod_base = OTHER; note = 2'-deoxy-2'-fluorocytidine-3'-phosphate
  modified_base 10: mod_base = OTHER; note = 2'-O-methyladenosine-3'-phosphate
  modified_base 11: mod_base = OTHER; note = 2'-O-methyladenosine-3'-phosphate
  modified_base 12: mod_base = OTHER; note = 2'-O-methylguanosine-3'-phosphate
  modified_base 13: mod_base = OTHER; note = 2'-O-methyluridine-3'-phosphate
  modified_base 14: mod_base = OTHER; note = 2'-deoxy-2'-fluorouridine-3'-phosphate
  modified_base 15: mod_base = OTHER; note = 2'-O-methylcytidine-3'-phosphate
  modified_base 16: mod_base = OTHER; note = 2'-deoxy-2'-fluoroadenosine-3'-phosphate
  modified_base 17: mod_base = OTHER; note = 2'-O-methyladenosine-3'-phosphate
  modified_base 18: mod_base = OTHER; note = 2'-O-methylguanosine-3'-phosphate
  modified_base 19: mod_base = OTHER; note = 2'-O-methylcytidine-3'-phosphate
  modified_base 20: mod_base = OTHER; note = 2'-O-methyluridine-3'-phosphate
  modified_base 21: mod_base = OTHER; note = 2'-O-methylguanosine-3'-phosphorothioate
  modified_base 22: mod_base = OTHER; note = 2'-O-methylguanosine-3'-phosphorothioate
  modified_base 23: mod_base = OTHER; note = 2'-O-methylguanosine
agtatgctcaagttcaagctggg

SEQ ID NO: 6048 - RNA, 23 nt, synthetic construct
  source 1..23: mol_type = other RNA
  modified_base 1: mod_base = OTHER; note = 2'-O-methyladenosine-3'-phosphorothioate
  modified_base 2: mod_base = OTHER; note = 2'-deoxy-2'-fluorouridine-3'-phosphorothioate
  modified_base 3: mod_base = OTHER; note = 2'-O-methyluridine-3'-phosphate
  modified_base 4: mod_base = OTHER; note = 2'-O-methyladenosine-3'-phosphate
  modified_base 5: mod_base = OTHER; note = 2'-O-methylguanosine-3'-phosphate
  modified_base 6: mod_base = OTHER; note = 2'-deoxy-2'-fluorocytidine-3'-phosphate
  modified_base 7: mod_base = OTHER; note = 2'-O-methyladenosine-3'-phosphate
  modified_base 8: mod_base = OTHER; note = 2'-deoxy-2'-fluoroadenosine-3'-phosphate
  modified_base 9: mod_base = OTHER; note = 2'-deoxy-2'-fluoroadenosine-3'-phosphate
  modified_base 10: mod_base = OTHER; note = 2'-O-methyluridine-3'-phosphate
  modified_base 11: mod_base = OTHER; note = 2'-O-methylcytidine-3'-phosphate
  modified_base 12: mod_base = OTHER; note = 2'-O-methyladenosine-3'-phosphate
  modified_base 13: mod_base = OTHER; note = 2'-O-methyladenosine-3'-phosphate
  modified_base 14: mod_base = OTHER; note = 2'-deoxy-2'-fluoroadenosine-3'-phosphate
  modified_base 15: mod_base = OTHER; note = 2'-O-methyladenosine-3'-phosphate
  modified_base 16: mod_base = OTHER; note = 2'-deoxy-2'-fluoroguanosine-3'-phosphate
  modified_base 17: mod_base = OTHER; note = 2'-O-methyladenosine-3'-phosphate
  modified_base 18: mod_base = OTHER; note = 2'-O-methyladenosine-3'-phosphate
  modified_base 19: mod_base = OTHER; note = 2'-O-methylguanosine-3'-phosphate
  modified_base 20: mod_base = OTHER; note = 2'-O-methylcytidine-3'-phosphate
  modified_base 21: mod_base = OTHER; note = 2'-O-methyluridine-3'-phosphorothioate
  modified_base 22: mod_base = OTHER; note = 2'-O-methylguanosine-3'-phosphorothioate
  modified_base 23: mod_base = OTHER; note = 2'-O-methyladenosine
attagcaaatcaaaagaagctga

SEQ ID NO: 6049 - RNA, 23 nt, synthetic construct
  source 1..23: mol_type = other RNA
  modified_base 1: mod_base = OTHER; note = 2'-O-methyladenosine-3'-phosphorothioate
  modified_base 2: mod_base = OTHER; note = 2'-deoxy-2'-fluorocytidine-3'-phosphorothioate
  modified_base 3: mod_base = OTHER; note = 2'-O-methyladenosine-3'-phosphate
  modified_base 4: mod_base = OTHER; note = 2'-O-methyluridine-3'-phosphate
  modified_base 5: mod_base = OTHER; note = 2'-O-methylguanosine-3'-phosphate
  modified_base 6: mod_base = OTHER; note = 2'-deoxy-2'-fluorouridine-3'-phosphate
  modified_base 7: mod_base = OTHER; note = 2'-O-methylguanosine-3'-phosphate
  modified_base 8: mod_base = OTHER; note = 2'-deoxy-2'-fluoroadenosine-3'-phosphate
  modified_base 9: mod_base = OTHER; note = 2'-deoxy-2'-fluoroguanosine-3'-phosphate
  modified_base 10: mod_base = OTHER; note = 2'-O-methylcytidine-3'-phosphate
  modified_base 11: mod_base = OTHER; note = 2'-O-methyladenosine-3'-phosphate
  modified_base 12: mod_base = OTHER; note = 2'-O-methyladenosine-3'-phosphate
  modified_base 13: mod_base = OTHER; note = 2'-O-methylguanosine-3'-phosphate
  modified_base 14: mod_base = OTHER; note = 2'-deoxy-2'-fluorouridine-3'-phosphate
  modified_base 15: mod_base = OTHER; note = 2'-O-methylguanosine-3'-phosphate
  modified_base 16: mod_base = OTHER; note = 2'-deoxy-2'-fluorouridine-3'-phosphate
  modified_base 17: mod_base = OTHER; note = 2'-O-methylguanosine-3'-phosphate
  modified_base 18: mod_base = OTHER; note = 2'-O-methyladenosine-3'-phosphate
  modified_base 19: mod_base = OTHER; note = 2'-O-methyluridine-3'-phosphate
  modified_base 20: mod_base = OTHER; note = 2'-O-methylguanosine-3'-phosphate
  modified_base 21: mod_base = OTHER; note = 2'-O-methyluridine-3'-phosphorothioate
  modified_base 22: mod_base = OTHER; note = 2'-O-methyluridine-3'-phosphorothioate
  modified_base 23: mod_base = OTHER; note = 2'-O-methyluridine
acatgtgagcaagtgtgatgttt

SEQ ID NO: 6050 - RNA, 23 nt, synthetic construct
  source 1..23: mol_type = other RNA
  modified_base 1: mod_base = OTHER; note = 2'-O-methyladenosine-3'-phosphorothioate
  modified_base 2: mod_base = OTHER; note = 2'-deoxy-2'-fluorouridine-3'-phosphorothioate
  modified_base 3: mod_base = OTHER; note = 2'-O-methylguanosine-3'-phosphate
  modified_base 4: mod_base = OTHER; note = 2'-O-methyladenosine-3'-phosphate
  modified_base 5: mod_base = OTHER; note = 2'-O-methyladenosine-3'-phosphate
  modified_base 6: mod_base = OTHER; note = 2'-deoxy-2'-fluorocytidine-3'-phosphate
  modified_base 7: mod_base = OTHER; note = 2'-O-methyladenosine-3'-phosphate
  modified_base 8: mod_base = OTHER; note = 2'-deoxy-2'-fluoroguanosine-3'-phosphate
  modified_base 9: mod_base = OTHER; note = 2'-deoxy-2'-fluorocytidine-3'-phosphate
  modified_base 10: mod_base = OTHER; note = 2'-O-methyladenosine-3'-phosphate
  modified_base 11: mod_base = OTHER; note = 2'-O-methyluridine-3'-phosphate
  modified_base 12: mod_base = OTHER; note = 2'-O-methyladenosine-3'-phosphate
  modified_base 13: mod_base = OTHER; note = 2'-O-methyladenosine-3'-phosphate
  modified_base 14: mod_base = OTHER; note = 2'-deoxy-2'-fluoroadenosine-3'-phosphate
  modified_base 15: mod_base = OTHER; note = 2'-O-methylcytidine-3'-phosphate
  modified_base 16: mod_base = OTHER; note = 2'-deoxy-2'-fluoroadenosine-3'-phosphate
  modified_base 17: mod_base = OTHER; note = 2'-O-methylguanosine-3'-phosphate
  modified_base 18: mod_base = OTHER; note = 2'-O-methylguanosine-3'-phosphate
  modified_base 19: mod_base = OTHER; note = 2'-O-methylcytidine-3'-phosphate
  modified_base 20: mod_base = OTHER; note = 2'-O-methyladenosine-3'-phosphate
  modified_base 21: mod_base = OTHER; note = 2'-O-methyluridine-3'-phosphorothioate
  modified_base 22: mod_base = OTHER; note = 2'-O-methylguanosine-3'-phosphorothioate
  modified_base 23: mod_base = OTHER; note = 2'-O-methyluridine
atgaacagcataaacaggcatgt

SEQ ID NO: 6051 - RNA, 23 nt, synthetic construct
  source 1..23: mol_type = other RNA
  modified_base 1: mod_base = OTHER; note = 2'-O-methyladenosine-3'-phosphorothioate
  modified_base 2: mod_base = OTHER; note = 2'-deoxy-2'-fluoroguanosine-3'-phosphorothioate
  modified_base 3: mod_base = OTHER; note = 2'-O-methyluridine-3'-phosphate
  modified_base 4: mod_base = OTHER; note = 2'-O-methyladenosine-3'-phosphate
  modified_base 5: mod_base = OTHER; note = 2'-O-methyladenosine-3'-phosphate
  modified_base 6: mod_base = OTHER; note = 2'-deoxy-2'-fluoroguanosine-3'-phosphate
  modified_base 7: mod_base = OTHER; note = 2'-O-methyladenosine-3'-phosphate
  modified_base 8: mod_base = OTHER; note = 2'-deoxy-2'-fluoroadenosine-3'-phosphate
  modified_base 9: mod_base = OTHER; note = 2'-deoxy-2'-fluoroadenosine-3'-phosphate
  modified_base 10: mod_base = OTHER; note = 2'-O-methylcytidine-3'-phosphate
  modified_base 11: mod_base = OTHER; note = 2'-O-methyladenosine-3'-phosphate
  modified_base 12: mod_base = OTHER; note = 2'-O-methyluridine-3'-phosphate
  modified_base 13: mod_base = OTHER; note = 2'-O-methyladenosine-3'-phosphate
  modified_base 14: mod_base = OTHER; note = 2'-deoxy-2'-fluoroadenosine-3'-phosphate
  modified_base 15: mod_base = OTHER; note = 2'-O-methyladenosine-3'-phosphate
  modified_base 16: mod_base = OTHER; note = 2'-deoxy-2'-fluorocytidine-3'-phosphate
  modified_base 17: mod_base = OTHER; note = 2'-O-methyladenosine-3'-phosphate
  modified_base 18: mod_base = OTHER; note = 2'-O-methyladenosine-3'-phosphate
  modified_base 19: mod_base = OTHER; note = 2'-O-methylcytidine-3'-phosphate
  modified_base 20: mod_base = OTHER; note = 2'-O-methyladenosine-3'-phosphate
  modified_base 21: mod_base = OTHER; note = 2'-O-methyluridine-3'-phosphorothioate
  modified_base 22: mod_base = OTHER; note = 2'-O-methylguanosine-3'-phosphorothioate
  modified_base 23: mod_base = OTHER; note = 2'-O-methyladenosine
agtaagaaacataaacaacatga

SEQ ID NO: 6052 - RNA, 23 nt, synthetic construct
  source 1..23: mol_type = other RNA
  modified_base 1: mod_base = OTHER; note = 2'-O-methyladenosine-3'-phosphorothioate
  modified_base 2: mod_base = OTHER; note = 2'-deoxy-2'-fluoroadenosine-3'-phosphorothioate
  modified_base 3: mod_base = OTHER; note = 2'-O-methylguanosine-3'-phosphate
  modified_base 4: mod_base = OTHER; note = 2'-O-methyladenosine-3'-phosphate
  modified_base 5: mod_base = OTHER; note = 2'-O-methylcytidine-3'-phosphate
  modified_base 6: mod_base = OTHER; note = 2'-deoxy-2'-fluorouridine-3'-phosphate
  modified_base 7: mod_base = OTHER; note = 2'-O-methyladenosine-3'-phosphate
  modified_base 8: mod_base = OTHER; note = 2'-deoxy-2'-fluorouridine-3'-phosphate
  modified_base 9: mod_base = OTHER; note = 2'-deoxy-2'-fluorouridine-3'-phosphate
  modified_base 10: mod_base = OTHER; note = 2'-O-methyluridine-3'-phosphate
  modified_base 11: mod_base = OTHER; note = 2'-O-methyladenosine-3'-phosphate
  modified_base 12: mod_base = OTHER; note = 2'-O-methyluridine-3'-phosphate
  modified_base 13: mod_base = OTHER; note = 2'-O-methyluridine-3'-phosphate
  modified_base 14: mod_base = OTHER; note = 2'-deoxy-2'-fluorocytidine-3'-phosphate
  modified_base 15: mod_base = OTHER; note = 2'-O-methyluridine-3'-phosphate
  modified_base 16: mod_base = OTHER; note = 2'-deoxy-2'-fluoroadenosine-3'-phosphate
  modified_base 17: mod_base = OTHER; note = 2'-O-methylguanosine-3'-phosphate
  modified_base 18: mod_base = OTHER; note = 2'-O-methylguanosine-3'-phosphate
  modified_base 19: mod_base = OTHER; note = 2'-O-methyluridine-3'-phosphate
  modified_base 20: mod_base = OTHER; note = 2'-O-methyladenosine-3'-phosphate
  modified_base 21: mod_base = OTHER; note = 2'-O-methyladenosine-3'-phosphorothioate
  modified_base 22: mod_base = OTHER; note = 2'-O-methylguanosine-3'-phosphorothioate
  modified_base 23: mod_base = OTHER; note = 2'-O-methyladenosine
aagactatttattctaggtaaga

SEQ ID NO: 6053 - RNA, 23 nt, synthetic construct
  source 1..23: mol_type = other RNA
  modified_base 1: mod_base = OTHER; note = 2'-O-methyladenosine-3'-phosphorothioate
  modified_base 2: mod_base = OTHER; note = 2'-deoxy-2'-fluoroadenosine-3'-phosphorothioate
  modified_base 3: mod_base = OTHER; note = 2'-O-methylguanosine-3'-phosphate
  modified_base 4: mod_base = OTHER; note = 2'-O-methyladenosine-3'-phosphate
  modified_base 5: mod_base = OTHER; note = 2'-O-methyladenosine-3'-phosphate
  modified_base 6: mod_base = OTHER; note = 2'-deoxy-2'-fluoroguanosine-3'-phosphate
  modified_base 7: mod_base = OTHER; note = 2'-O-methyluridine-3'-phosphate
  modified_base 8: mod_base = OTHER; note = 2'-deoxy-2'-fluorocytidine-3'-phosphate
  modified_base 9: mod_base = OTHER; note = 2'-deoxy-2'-fluoroguanosine-3'-phosphate
  modified_base 10: mod_base = OTHER; note = 2'-O-methylguanosine-3'-phosphate
  modified_base 11: mod_base = OTHER; note = 2'-O-methylguanosine-3'-phosphate
  modified_base 12: mod_base = OTHER; note = 2'-O-methyladenosine-3'-phosphate
  modified_base 13: mod_base = OTHER; note = 2'-O-methyladenosine-3'-phosphate
  modified_base 14: mod_base = OTHER; note = 2'-deoxy-2'-fluoroadenosine-3'-phosphate
  modified_base 15: mod_base = OTHER; note = 2'-O-methyladenosine-3'-phosphate
  modified_base 16: mod_base = OTHER; note = 2'-deoxy-2'-fluoroguanosine-3'-phosphate
  modified_base 17: mod_base = OTHER; note = 2'-O-methyladenosine-3'-phosphate
  modified_base 18: mod_base = OTHER; note = 2'-O-methyladenosine-3'-phosphate
  modified_base 19: mod_base = OTHER; note = 2'-O-methylguanosine-3'-phosphate
  modified_base 20: mod_base = OTHER; note = 2'-O-methyluridine-3'-phosphate
  modified_base 21: mod_base = OTHER; note = 2'-O-methyladenosine-3'-phosphorothioate
  modified_base 22: mod_base = OTHER; note = 2'-O-methylguanosine-3'-phosphorothioate
  modified_base 23: mod_base = OTHER; note = 2'-O-methylguanosine
aagaagtcgggaaaagaagtagg

SEQ ID NO: 6054 - RNA, 23 nt, synthetic construct
  source 1..23: mol_type = other RNA
  modified_base 1: mod_base = OTHER; note = 2'-O-methyladenosine-3'-phosphorothioate
  modified_base 2: mod_base = OTHER; note = 2'-deoxy-2'-fluorouridine-3'-phosphorothioate
  modified_base 3: mod_base = OTHER; note = 2'-O-methylguanosine-3'-phosphate
  modified_base 4: mod_base = OTHER; note = 2'-O-methyladenosine-3'-phosphate
  modified_base 5: mod_base = OTHER; note = 2'-O-methyladenosine-3'-phosphate
  modified_base 6: mod_base = OTHER; note = 2'-deoxy-2'-fluorouridine-3'-phosphate
  modified_base 7: mod_base = OTHER; note = 2'-O-methylcytidine-3'-phosphate
  modified_base 8: mod_base = OTHER; note = 2'-deoxy-2'-fluorouridine-3'-phosphate
  modified_base 9: mod_base = OTHER; note = 2'-deoxy-2'-fluorouridine-3'-phosphate
  modified_base 10: mod_base = OTHER; note = 2'-O-methyladenosine-3'-phosphate
  modified_base 11: mod_base = OTHER; note = 2'-O-methylguanosine-3'-phosphate
  modified_base 12: mod_base = OTHER; note = 2'-O-methylguanosine-3'-phosphate
  modified_base 13: mod_base = OTHER; note = 2'-O-methyladenosine-3'-phosphate
  modified_base 14: mod_base = OTHER; note = 2'-deoxy-2'-fluoroadenosine-3'-phosphate
  modified_base 15: mod_base = OTHER; note = 2'-O-methyladenosine-3'-phosphate
  modified_base 16: mod_base = OTHER; note = 2'-deoxy-2'-fluoroadenosine-3'-phosphate
  modified_base 17: mod_base = OTHER; note = 2'-O-methyladenosine-3'-phosphate
  modified_base 18: mod_base = OTHER; note = 2'-O-methylguanosine-3'-phosphate
  modified_base 19: mod_base = OTHER; note = 2'-O-methyluridine-3'-phosphate
  modified_base 20: mod_base = OTHER; note = 2'-O-methyladenosine-3'-phosphate
  modified_base 21: mod_base = OTHER; note = 2'-O-methyladenosine-3'-phosphorothioate
  modified_base 22: mod_base = OTHER; note = 2'-O-methylguanosine-3'-phosphorothioate
  modified_base 23: mod_base = OTHER; note = 2'-O-methyladenosine
atgaatcttaggaaaaagtaaga

SEQ ID NO: 6055 - RNA, 23 nt, synthetic construct
  source 1..23: mol_type = other RNA
  modified_base 1: mod_base = OTHER; note = 2'-O-methyladenosine-3'-phosphorothioate
  modified_base 2: mod_base = OTHER; note = 2'-deoxy-2'-fluoroguanosine-3'-phosphorothioate
  modified_base 3: mod_base = OTHER; note = 2'-O-methylguanosine-3'-phosphate
  modified_base 4: mod_base = OTHER; note = 2'-O-methyladenosine-3'-phosphate
  modified_base 5: mod_base = OTHER; note = 2'-O-methylguanosine-3'-phosphate
  modified_base 6: mod_base = OTHER; note = 2'-deoxy-2'-fluorocytidine-3'-phosphate
  modified_base 7: mod_base = OTHER; note = 2'-O-methyladenosine-3'-phosphate
  modified_base 8: mod_base = OTHER; note = 2'-deoxy-2'-fluorouridine-3'-phosphate
  modified_base 9: mod_base = OTHER; note = 2'-deoxy-2'-fluoroguanosine-3'-phosphate
  modified_base 10: mod_base = OTHER; note = 2'-O-methyladenosine-3'-phosphate
  modified_base 11: mod_base = OTHER; note = 2'-O-methyluridine-3'-phosphate
  modified_base 12: mod_base = OTHER; note = 2'-O-methylguanosine-3'-phosphate
  modified_base 13: mod_base = OTHER; note = 2'-O-methylcytidine-3'-phosphate
  modified_base 14: mod_base = OTHER; note = 2'-deoxy-2'-fluorouridine-3'-phosphate
  modified_base 15: mod_base = OTHER; note = 2'-O-methylguanosine-3'-phosphate
  modified_base 16: mod_base = OTHER; note = 2'-deoxy-2'-fluorouridine-3'-phosphate
  modified_base 17: mod_base = OTHER; note = 2'-O-methyladenosine-3'-phosphate
  modified_base 18: mod_base = OTHER; note = 2'-O-methylcytidine-3'-phosphate
  modified_base 19: mod_base = OTHER; note = 2'-O-methyladenosine-3'-phosphate
  modified_base 20: mod_base = OTHER; note = 2'-O-methylcytidine-3'-phosphate
  modified_base 21: mod_base = OTHER; note = 2'-O-methyluridine-3'-phosphorothioate
  modified_base 22: mod_base = OTHER; note = 2'-O-methylguanosine-3'-phosphorothioate
  modified_base 23: mod_base = OTHER; note = 2'-O-methyladenosine
aggagcatgatgctgtacactga

SEQ ID NO: 6056 - RNA, 23 nt, synthetic construct
  source 1..23: mol_type = other RNA
  modified_base 1: mod_base = OTHER; note = 2'-O-methyladenosine-3'-phosphorothioate
  modified_base 2: mod_base = OTHER; note = 2'-deoxy-2'-fluoroadenosine-3'-phosphorothioate
  modified_base 3: mod_base = OTHER; note = 2'-O-methylguanosine-3'-phosphate
  modified_base 4: mod_base = OTHER; note = 2'-O-methylguanosine-3'-phosphate
  modified_base 5: mod_base = OTHER; note = 2'-O-methyladenosine-3'-phosphate
  modified_base 6: mod_base = OTHER; note = 2'-deoxy-2'-fluoroadenosine-3'-phosphate
  modified_base 7: mod_base = OTHER; note = 2'-O-methylguanosine-3'-phosphate
  modified_base 8: mod_base = OTHER; note = 2'-deoxy-2'-fluoroguanosine-3'-phosphate
  modified_base 9: mod_base = OTHER; note = 2'-deoxy-2'-fluorouridine-3'-phosphate
  modified_base 10: mod_base = OTHER; note = 2'-O-methyluridine-3'-phosphate
  modified_base 11: mod_base = OTHER; note = 2'-O-methyluridine-3'-phosphate
  modified_base 12: mod_base = OTHER; note = 2'-O-methylguanosine-3'-phosphate
  modified_base 13: mod_base = OTHER; note = 2'-O-methylcytidine-3'-phosphate
  modified_base 14: mod_base = OTHER; note = 2'-deoxy-2'-fluorouridine-3'-phosphate
  modified_base 15: mod_base = OTHER; note = 2'-O-methylguanosine-3'-phosphate
  modified_base 16: mod_base = OTHER; note = 2'-deoxy-2'-fluorouridine-3'-phosphate
  modified_base 17: mod_base = OTHER; note = 2'-O-methylguanosine-3'-phosphate
  modified_base 18: mod_base = OTHER; note = 2'-O-methylguanosine-3'-phosphate
  modified_base 19: mod_base = OTHER; note = 2'-O-methyladenosine-3'-phosphate
  modified_base 20: mod_base = OTHER; note = 2'-O-methylguanosine-3'-phosphate
  modified_base 21: mod_base = OTHER; note = 2'-O-methylcytidine-3'-phosphorothioate
  modified_base 22: mod_base = OTHER; note = 2'-O-methyladenosine-3'-phosphorothioate
  modified_base 23: mod_base = OTHER; note = 2'-O-methyluridine
aaggaaggtttgctgtggagcat

SEQ ID NO: 6057 - RNA, 23 nt, synthetic construct
  source 1..23: mol_type = other RNA
  modified_base 1: mod_base = OTHER; note = 2'-O-methyladenosine-3'-phosphorothioate
  modified_base 2: mod_base = OTHER; note = 2'-deoxy-2'-fluoroadenosine-3'-phosphorothioate
  modified_base 3: mod_base = OTHER; note = 2'-O-methyluridine-3'-phosphate
  modified_base 4: mod_base = OTHER; note = 2'-O-methyluridine-3'-phosphate
  modified_base 5: mod_base = OTHER; note = 2'-O-methyladenosine-3'-phosphate
  modified_base 6: mod_base = OTHER; note = 2'-deoxy-2'-fluorouridine-3'-phosphate
  modified_base 7: mod_base = OTHER; note = 2'-O-methylguanosine-3'-phosphate
  modified_base 8: mod_base = OTHER; note = 2'-deoxy-2'-fluorouridine-3'-phosphate
  modified_base 9: mod_base = OTHER; note = 2'-deoxy-2'-fluoroadenosine-3'-phosphate
  modified_base 10: mod_base = OTHER; note = 2'-O-methylguanosine-3'-phosphate
  modified_base 11: mod_base = OTHER; note = 2'-O-methylguanosine-3'-phosphate
  modified_base 12: mod_base = OTHER; note = 2'-O-methyluridine-3'-phosphate
  modified_base 13: mod_base = OTHER; note = 2'-O-methyluridine-3'-phosphate
  modified_base 14: mod_base = OTHER; note = 2'-deoxy-2'-fluorouridine-3'-phosphate
  modified_base 15: mod_base = OTHER; note = 2'-O-methyluridine-3'-phosphate
  modified_base 16: mod_base = OTHER; note = 2'-deoxy-2'-fluoroguanosine-3'-phosphate
  modified_base 17: mod_base = OTHER; note = 2'-O-methyladenosine-3'-phosphate
  modified_base 18: mod_base = OTHER; note = 2'-O-methylguanosine-3'-phosphate
  modified_base 19: mod_base = OTHER; note = 2'-O-methyladenosine-3'-phosphate
  modified_base 20: mod_base = OTHER; note = 2'-O-methylguanosine-3'-phosphate
  modified_base 21: mod_base = OTHER; note = 2'-O-methylguanosine-3'-phosphorothioate
  modified_base 22: mod_base = OTHER; note = 2'-O-methylguanosine-3'-phosphorothioate
  modified_base 23: mod_base = OTHER; note = 2'-O-methyladenosine
aattatgtaggttttgagaggga

SEQ ID NO: 6058 - RNA, 23 nt, synthetic construct
  source 1..23: mol_type = other RNA
  modified_base 1: mod_base = OTHER; note = 2'-O-methyladenosine-3'-phosphorothioate
  modified_base 2: mod_base = OTHER; note = 2'-deoxy-2'-fluoroadenosine-3'-phosphorothioate
  modified_base 3: mod_base = OTHER; note = 2'-O-methylcytidine-3'-phosphate
  modified_base 4: mod_base = OTHER; note = 2'-O-methyladenosine-3'-phosphate
  modified_base 5: mod_base = OTHER; note = 2'-O-methylguanosine-3'-phosphate
  modified_base 6: mod_base = OTHER; note = 2'-deoxy-2'-fluoroguanosine-3'-phosphate
  modified_base 7: mod_base = OTHER; note = 2'-O-methyladenosine-3'-phosphate
  modified_base 8: mod_base = OTHER; note = 2'-deoxy-2'-fluoroguanosine-3'-phosphate
  modified_base 9: mod_base = OTHER; note = 2'-deoxy-2'-fluoroadenosine-3'-phosphate
  modified_base 10: mod_base = OTHER; note = 2'-O-methylguanosine-3'-phosphate
  modified_base 11: mod_base = OTHER; note = 2'-O-methylguanosine-3'-phosphate
  modified_base 12: mod_base = OTHER; note = 2'-O-methyluridine-3'-phosphate
  modified_base 13: mod_base = OTHER; note = 2'-O-methyladenosine-3'-phosphate
  modified_base 14: mod_base = OTHER; note = 2'-deoxy-2'-fluoroadenosine-3'-phosphate
  modified_base 15: mod_base = OTHER; note = 2'-O-methyladenosine-3'-phosphate
  modified_base 16: mod_base = OTHER; note = 2'-deoxy-2'-fluorouridine-3'-phosphate
  modified_base 17: mod_base = OTHER; note = 2'-O-methyladenosine-3'-phosphate
  modified_base 18: mod_base = OTHER; note = 2'-O-methylcytidine-3'-phosphate
  modified_base 19: mod_base = OTHER; note = 2'-O-methyladenosine-3'-phosphate
  modified_base 20: mod_base = OTHER; note = 2'-O-methyladenosine-3'-phosphate
  modified_base 21: mod_base = OTHER; note = 2'-O-methyluridine-3'-phosphorothioate
  modified_base 22: mod_base = OTHER; note = 2'-O-methylcytidine-3'-phosphorothioate
  modified_base 23: mod_base = OTHER; note = 2'-O-methyluridine
aacaggagaggtaaatacaatct

SEQ ID NO: 6059 - RNA, 23 nt, synthetic construct
  source 1..23: mol_type = other RNA
  modified_base 1: mod_base = OTHER; note = 2'-O-methyladenosine-3'-phosphorothioate
  modified_base 2: mod_base = OTHER; note = 2'-deoxy-2'-fluoroadenosine-3'-phosphorothioate
  modified_base 3: mod_base = OTHER; note = 2'-O-methyluridine-3'-phosphate
  modified_base 4: mod_base = OTHER; note = 2'-O-methyluridine-3'-phosphate
  modified_base 5: mod_base = OTHER; note = 2'-O-methyluridine-3'-phosphate
  modified_base 6: mod_base = OTHER; note = 2'-deoxy-2'-fluorouridine-3'-phosphate
  modified_base 7: mod_base = OTHER; note = 2'-O-methylcytidine-3'-phosphate
  modified_base 8: mod_base = OTHER; note = 2'-deoxy-2'-fluoroadenosine-3'-phosphate
  modified_base 9: mod_base = OTHER; note = 2'-deoxy-2'-fluoroadenosine-3'-phosphate
  modified_base 10: mod_base = OTHER; note = 2'-O-methyladenosine-3'-phosphate
  modified_base 11: mod_base = OTHER; note = 2'-O-methyladenosine-3'-phosphate
  modified_base 12: mod_base = OTHER; note = 2'-O-methylcytidine-3'-phosphate
  modified_base 13: mod_base = OTHER; note = 2'-O-methyladenosine-3'-phosphate
  modified_base 14: mod_base = OTHER; note = 2'-deoxy-2'-fluoroadenosine-3'-phosphate
  modified_base 15: mod_base = OTHER; note = 2'-O-methyluridine-3'-phosphate
  modified_base 16: mod_base = OTHER; note = 2'-deoxy-2'-fluoroguanosine-3'-phosphate
  modified_base 17: mod_base = OTHER; note = 2'-O-methyluridine-3'-phosphate
  modified_base 18: mod_base = OTHER; note = 2'-O-methylguanosine-3'-phosphate
  modified_base 19: mod_base = OTHER; note = 2'-O-methylguanosine-3'-phosphate
  modified_base 20: mod_base = OTHER; note = 2'-O-methyluridine-3'-phosphate
  modified_base 21: mod_base = OTHER; note = 2'-O-methyluridine-3'-phosphorothioate
  modified_base 22: mod_base = OTHER; note = 2'-O-methylguanosine-3'-phosphorothioate
  modified_base 23: mod_base = OTHER; note = 2'-O-methyladenosine
aattttcaaaacaatgtggttga

SEQ ID NO: 6060 - RNA, 23 nt, synthetic construct
  source 1..23: mol_type = other RNA
  modified_base 1: mod_base = OTHER; note = 2'-O-methyladenosine-3'-phosphorothioate
  modified_base 2: mod_base = OTHER; note = 2'-deoxy-2'-fluoroadenosine-3'-phosphorothioate
  modified_base 3: mod_base = OTHER; note = 2'-O-methylguanosine-3'-phosphate
  modified_base 4: mod_base = OTHER; note = 2'-O-methyladenosine-3'-phosphate
  modified_base 5: mod_base = OTHER; note = 2'-O-methylguanosine-3'-phosphate
  modified_base 6: mod_base = OTHER; note = 2'-deoxy-2'-fluoroguanosine-3'-phosphate
  modified_base 7: mod_base = OTHER; note = 2'-O-methyladenosine-3'-phosphate
  modified_base 8: mod_base = OTHER; note = 2'-deoxy-2'-fluoroguanosine-3'-phosphate
  modified_base 9: mod_base = OTHER; note = 2'-deoxy-2'-fluoroadenosine-3'-phosphate
  modified_base 10: mod_base = OTHER; note = 2'-O-methylcytidine-3'-phosphate
  modified_base 11: mod_base = OTHER; note = 2'-O-methyladenosine-3'-phosphate
  modified_base 12: mod_base = OTHER; note = 2'-O-methylcytidine-3'-phosphate
  modified_base 13: mod_base = OTHER; note = 2'-O-methyladenosine-3'-phosphate
  modified_base 14: mod_base = OTHER; note = 2'-deoxy-2'-fluoroadenosine-3'-phosphate
  modified_base 15: mod_base = OTHER; note = 2'-O-methyladenosine-3'-phosphate
  modified_base 16: mod_base = OTHER; note = 2'-deoxy-2'-fluorouridine-3'-phosphate
  modified_base 17: mod_base = OTHER; note = 2'-O-methyladenosine-3'-phosphate
  modified_base 18: mod_base = OTHER; note = 2'-O-methylguanosine-3'-phosphate
  modified_base 19: mod_base = OTHER; note = 2'-O-methyladenosine-3'-phosphate
  modified_base 20: mod_base = OTHER; note = 2'-O-methyladenosine-3'-phosphate
  modified_base 21: mod_base = OTHER; note = 2'-O-methyladenosine-3'-phosphorothioate
  modified_base 22: mod_base = OTHER; note = 2'-O-methyluridine-3'-phosphorothioate
  modified_base 23: mod_base = OTHER; note = 2'-O-methyladenosine
aagaggagacacaaatagaaata

SEQ ID NO: 6061 - RNA, 23 nt, synthetic construct
  source 1..23: mol_type = other RNA
  modified_base 1: mod_base = OTHER; note = 2'-O-methyladenosine-3'-phosphorothioate
  modified_base 2: mod_base = OTHER; note = 2'-deoxy-2'-fluoroguanosine-3'-phosphorothioate
  modified_base 3: mod_base = OTHER; note = 2'-O-methyladenosine-3'-phosphate
  modified_base 4: mod_base = OTHER; note = 2'-O-methylcytidine-3'-phosphate
  modified_base 5: mod_base = OTHER; note = 2'-O-methyladenosine-3'-phosphate
  modified_base 6: mod_base = OTHER; note = 2'-deoxy-2'-fluorouridine-3'-phosphate
  modified_base 7: mod_base = OTHER; note = 2'-O-methyluridine-3'-phosphate
  modified_base 8: mod_base = OTHER; note = 2'-deoxy-2'-fluoroadenosine-3'-phosphate
  modified_base 9: mod_base = OTHER; note = 2'-deoxy-2'-fluorouridine-3'-phosphate
  modified_base 10: mod_base = OTHER; note = 2'-O-methyladenosine-3'-phosphate
  modified_base 11: mod_base = OTHER; note = 2'-O-methylcytidine-3'-phosphate
  modified_base 12: mod_base = OTHER; note = 2'-O-methyluridine-3'-phosphate
  modified_base 13: mod_base = OTHER; note = 2'-O-methylguanosine-3'-phosphate
  modified_base 14: mod_base = OTHER; note = 2'-deoxy-2'-fluorocytidine-3'-phosphate
  modified_base 15: mod_base = OTHER; note = 2'-O-methyladenosine-3'-phosphate
  modified_base 16: mod_base = OTHER; note = 2'-deoxy-2'-fluoroguanosine-3'-phosphate
  modified_base 17: mod_base = OTHER; note = 2'-O-methyluridine-3'-phosphate
  modified_base 18: mod_base = OTHER; note = 2'-O-methyladenosine-3'-phosphate
  modified_base 19: mod_base = OTHER; note = 2'-O-methylguanosine-3'-phosphate
  modified_base 20: mod_base = OTHER; note = 2'-O-methyladenosine-3'-phosphate
  modified_base 21: mod_base = OTHER; note = 2'-O-methylguanosine-3'-phosphorothioate
  modified_base 22: mod_base = OTHER; note = 2'-O-methylguanosine-3'-phosphorothioate
  modified_base 23: mod_base = OTHER; note = 2'-O-methyladenosine
agacattatactgcagtagagga

SEQ ID NO: 6062 - RNA, 23 nt, synthetic construct
  source 1..23: mol_type = other RNA
  modified_base 1: mod_base = OTHER; note = 2'-O-methyladenosine-3'-phosphorothioate
  modified_base 2: mod_base = OTHER; note = 2'-deoxy-2'-fluoroguanosine-3'-phosphorothioate
  modified_base 3: mod_base = OTHER; note = 2'-O-methyladenosine-3'-phosphate
  modified_base 4: mod_base = OTHER; note = 2'-O-methyladenosine-3'-phosphate
  modified_base 5: mod_base = OTHER; note = 2'-O-methyluridine-3'-phosphate
  modified_base 6: mod_base = OTHER; note = 2'-deoxy-2'-fluoroguanosine-3'-phosphate
  modified_base 7: mod_base = OTHER; note = 2'-O-methylcytidine-3'-phosphate
  modified_base 8: mod_base = OTHER; note = 2'-deoxy-2'-fluoroadenosine-3'-phosphate
  modified_base 9: mod_base = OTHER; note = 2'-deoxy-2'-fluoroadenosine-3'-phosphate
  modified_base 10: mod_base = OTHER; note = 2'-O-methyluridine-3'-phosphate
  modified_base 11: mod_base = OTHER; note = 2'-O-methylguanosine-3'-phosphate
  modified_base 12: mod_base = OTHER; note = 2'-O-methyladenosine-3'-phosphate
  modified_base 13: mod_base = OTHER; note = 2'-O-methyluridine-3'-phosphate
  modified_base 14: mod_base = OTHER; note = 2'-deoxy-2'-fluoroguanosine-3'-phosphate
  modified_base 15: mod_base = OTHER; note = 2'-O-methyladenosine-3'-phosphate
  modified_base 16: mod_base = OTHER; note = 2'-deoxy-2'-fluoroadenosine-3'-phosphate
  modified_base 17: mod_base = OTHER; note = 2'-O-methyluridine-3'-phosphate
  modified_base 18: mod_base = OTHER; note = 2'-O-methyladenosine-3'-phosphate
  modified_base 19: mod_base = OTHER; note = 2'-O-methylcytidine-3'-phosphate
  modified_base 20: mod_base = OTHER; note = 2'-O-methyladenosine-3'-phosphate
  modified_base 21: mod_base = OTHER; note = 2'-O-methylcytidine-3'-phosphorothioate
  modified_base 22: mod_base = OTHER; note = 2'-O-methyladenosine-3'-phosphorothioate
  modified_base 23: mod_base = OTHER; note = 2'-O-methylguanosine
agaatgcaatgatgaatacacag

SEQ ID NO: 6063 - RNA, 23 nt, synthetic construct
  source 1..23: mol_type = other RNA
  modified_base 1: mod_base = OTHER; note = 2'-O-methyladenosine-3'-phosphorothioate
  modified_base 2: mod_base = OTHER; note = 2'-deoxy-2'-fluorouridine-3'-phosphorothioate
  modified_base 3: mod_base = OTHER; note = 2'-O-methyluridine-3'-phosphate
  modified_base 4: mod_base = OTHER; note = 2'-O-methyluridine-3'-phosphate
  modified_base 5: mod_base = OTHER; note = 2'-O-methyladenosine-3'-phosphate
  modified_base 6: mod_base = OTHER; note = 2'-deoxy-2'-fluorouridine-3'-phosphate
  modified_base 7: mod_base = OTHER; note = 2'-O-methylcytidine-3'-phosphate
  modified_base 8: mod_base = OTHER; note = 2'-deoxy-2'-fluoroadenosine-3'-phosphate
  modified_base 9: mod_base = OTHER; note = 2'-deoxy-2'-fluoroadenosine-3'-phosphate
  modified_base 10: mod_base = OTHER; note = 2'-O-methyluridine-3'-phosphate
  modified_base 11: mod_base = OTHER; note = 2'-O-methylguanosine-3'-phosphate
  modified_base 12: mod_base = OTHER; note = 2'-O-methyladenosine-3'-phosphate
  modified_base 13: mod_base = OTHER; note = 2'-O-methyluridine-3'-phosphate
  modified_base 14: mod_base = OTHER; note = 2'-deoxy-2'-fluoroadenosine-3'-phosphate
  modified_base 15: mod_base = OTHER; note = 2'-O-methyluridine-3'-phosphate
  modified_base 16: mod_base = OTHER; note = 2'-deoxy-2'-fluorocytidine-3'-phosphate
  modified_base 17: mod_base = OTHER; note = 2'-O-methyluridine-3'-phosphate
  modified_base 18: mod_base = OTHER; note = 2'-O-methylcytidine-3'-phosphate
  modified_base 19: mod_base = OTHER; note = 2'-O-methylcytidine-3'-phosphate
  modified_base 20: mod_base = OTHER; note = 2'-O-methyladenosine-3'-phosphate
  modified_base 21: mod_base = OTHER; note = 2'-O-methyluridine-3'-phosphorothioate
  modified_base 22: mod_base = OTHER; note = 2'-O-methyluridine-3'-phosphorothioate
  modified_base 23: mod_base = OTHER; note = 2'-O-methylcytidine
atttatcaatgatatctccattc

SEQ ID NO: 6064 - RNA, 23 nt, synthetic construct
  source 1..23: mol_type = other RNA
  modified_base 1: mod_base = OTHER; note = 2'-O-methyladenosine-3'-phosphorothioate
  modified_base 2: mod_base = OTHER; note = 2'-deoxy-2'-fluoroguanosine-3'-phosphorothioate
  modified_base 3: mod_base = OTHER; note = 2'-O-methylcytidine-3'-phosphate
  modified_base 4: mod_base = OTHER; note = 2'-O-methyluridine-3'-phosphate
  modified_base 5: mod_base = OTHER; note = 2'-O-methyluridine-3'-phosphate
  modified_base 6: mod_base = OTHER; note = 2'-deoxy-2'-fluorocytidine-3'-phosphate
  modified_base 7: mod_base = OTHER; note = 2'-O-methyluridine-3'-phosphate
  modified_base 8: mod_base = OTHER; note = 2'-deoxy-2'-fluoroguanosine-3'-phosphate
  modified_base 9: mod_base = OTHER; note = 2'-deoxy-2'-fluorouridine-3'-phosphate
  modified_base 10: mod_base = OTHER; note = 2'-O-methyluridine-3'-phosphate
  modified_base 11: mod_base = OTHER; note = 2'-O-methyladenosine-3'-phosphate
  modified_base 12: mod_base = OTHER; note = 2'-O-methyluridine-3'-phosphate
  modified_base 13: mod_base = OTHER; note = 2'-O-methylcytidine-3'-phosphate
  modified_base 14: mod_base = OTHER; note = 2'-deoxy-2'-fluoroadenosine-3'-phosphate
  modified_base 15: mod_base = OTHER; note = 2'-O-methyladenosine-3'-phosphate
  modified_base 16: mod_base = OTHER; note = 2'-deoxy-2'-fluoroadenosine-3'-phosphate
  modified_base 17: mod_base = OTHER; note = 2'-O-methyladenosine-3'-phosphate
  modified_base 18: mod_base = OTHER; note = 2'-O-methylguanosine-3'-phosphate
  modified_base 19: mod_base = OTHER; note = 2'-O-methylguanosine-3'-phosphate
  modified_base 20: mod_base = OTHER; note = 2'-O-methylguanosine-3'-phosphate
  modified_base 21: mod_base = OTHER; note = 2'-O-methylcytidine-3'-phosphorothioate
  modified_base 22: mod_base = OTHER; note = 2'-O-methyluridine-3'-phosphorothioate
  modified_base 23: mod_base = OTHER; note = 2'-O-methyluridine
agcttctgttatcaaaagggctt

SEQ ID NO: 6065 - RNA, 23 nt, synthetic construct
  source 1..23: mol_type = other RNA
  modified_base 1: mod_base = OTHER; note = 2'-O-methyladenosine-3'-phosphorothioate
  modified_base 2: mod_base = OTHER; note = 2'-deoxy-2'-fluoroadenosine-3'-phosphorothioate
  modified_base 3: mod_base = OTHER; note = 2'-O-methyluridine-3'-phosphate
  modified_base 4: mod_base = OTHER; note = 2'-O-methyluridine-3'-phosphate
  modified_base 5: mod_base = OTHER; note = 2'-O-methyladenosine-3'-phosphate
  modified_base 6: mod_base = OTHER; note = 2'-deoxy-2'-fluoroadenosine-3'-phosphate
  modified_base 7: mod_base = OTHER; note = 2'-O-methyladenosine-3'-phosphate
  modified_base 8: mod_base = OTHER; note = 2'-deoxy-2'-fluoroadenosine-3'-phosphate
  modified_base 9: mod_base = OTHER; note = 2'-deoxy-2'-fluorocytidine-3'-phosphate
  modified_base 10: mod_base = OTHER; note = 2'-O-methyladenosine-3'-phosphate
  modified_base 11: mod_base = OTHER; note = 2'-O-methyladenosine-3'-phosphate
  modified_base 12: mod_base = OTHER; note = 2'-O-methylguanosine-3'-phosphate
  modified_base 13: mod_base = OTHER; note = 2'-O-methylguanosine-3'-phosphate
  modified_base 14: mod_base = OTHER; note = 2'-deoxy-2'-fluoroadenosine-3'-phosphate
  modified_base 15: mod_base = OTHER; note = 2'-O-methylcytidine-3'-phosphate
  modified_base 16: mod_base = OTHER; note = 2'-deoxy-2'-fluorouridine-3'-phosphate
  modified_base 17: mod_base = OTHER; note = 2'-O-methyladenosine-3'-phosphate
  modified_base 18: mod_base = OTHER; note = 2'-O-methyluridine-3'-phosphate
  modified_base 19: mod_base = OTHER; note = 2'-O-methylcytidine-3'-phosphate
  modified_base 20: mod_base = OTHER; note = 2'-O-methyluridine-3'-phosphate
  modified_base 21: mod_base = OTHER; note = 2'-O-methylguanosine-3'-phosphorothioate
  modified_base 22: mod_base = OTHER; note = 2'-O-methylguanosine-3'-phosphorothioate
  modified_base 23: mod_base = OTHER; note = 2'-O-methylguanosine
aattaaaacaaggactatctggg

SEQ ID NO: 6066 - RNA, 23 nt, synthetic construct
  source 1..23: mol_type = other RNA
  modified_base 1: mod_base = OTHER; note = 2'-O-methyladenosine-3'-phosphorothioate
  modified_base 2: mod_base = OTHER; note = 2'-deoxy-2'-fluoroadenosine-3'-phosphorothioate
  modified_base 3: mod_base = OTHER; note = 2'-O-methylguanosine-3'-phosphate
  modified_base 4: mod_base = OTHER; note = 2'-O-methyladenosine-3'-phosphate
  modified_base 5: mod_base = OTHER; note = 2'-O-methylguanosine-3'-phosphate
  modified_base 6: mod_base = OTHER; note = 2'-deoxy-2'-fluorocytidine-3'-phosphate
  modified_base 7: mod_base = OTHER; note = 2'-O-methyladenosine-3'-phosphate
  modified_base 8: mod_base = OTHER; note = 2'-deoxy-2'-fluorouridine-3'-phosphate
  modified_base 9: mod_base = OTHER; note = 2'-deoxy-2'-fluorocytidine-3'-phosphate
  modified_base 10: mod_base = OTHER; note = 2'-O-methyladenosine-3'-phosphate
  modified_base 11: mod_base = OTHER; note = 2'-O-methyladenosine-3'-phosphate
  modified_base 12: mod_base = OTHER; note = 2'-O-methylguanosine-3'-phosphate
  modified_base 13: mod_base = OTHER; note = 2'-O-methyladenosine-3'-phosphate
  modified_base 14: mod_base = OTHER; note = 2'-deoxy-2'-fluorocytidine-3'-phosphate
  modified_base 15: mod_base = OTHER; note = 2'-O-methyladenosine-3'-phosphate
  modified_base 16: mod_base = OTHER; note = 2'-deoxy-2'-fluoroguanosine-3'-phosphate
  modified_base 17: mod_base = OTHER; note = 2'-O-methyluridine-3'-phosphate
  modified_base 18: mod_base = OTHER; note = 2'-O-methylguanosine-3'-phosphate
  modified_base 19: mod_base = OTHER; note = 2'-O-methylguanosine-3'-phosphate
  modified_base 20: mod_base = OTHER; note = 2'-O-methyluridine-3'-phosphate
  modified_base 21: mod_base = OTHER; note = 2'-O-methylguanosine-3'-phosphorothioate
  modified_base 22: mod_base = OTHER; note = 2'-O-methyladenosine-3'-phosphorothioate
  modified_base 23: mod_base = OTHER; note = 2'-O-methylguanosine
aagagcatcaagacagtggtgag

SEQ ID NO: 6067 - RNA, 23 nt, synthetic construct
  source 1..23: mol_type = other RNA
  modified_base 1: mod_base = OTHER; note = 2'-O-methyladenosine-3'-phosphorothioate
  modified_base 2: mod_base = OTHER; note = 2'-deoxy-2'-fluoroguanosine-3'-phosphorothioate
  modified_base 3: mod_base = OTHER; note = 2'-O-methyladenosine-3'-phosphate
  modified_base 4: mod_base = OTHER; note = 2'-O-methyladenosine-3'-phosphate
  modified_base 5: mod_base = OTHER; note = 2'-O-methylguanosine-3'-phosphate
  modified_base 6: mod_base = OTHER; note = 2'-deoxy-2'-fluoroadenosine-3'-phosphate
  modified_base 7: mod_base = OTHER; note = 2'-O-methylguanosine-3'-phosphate
  modified_base 8: mod_base = OTHER; note = 2'-deoxy-2'-fluoroguanosine-3'-phosphate
  modified_base 9: mod_base = OTHER; note = 2'-deoxy-2'-fluorouridine-3'-phosphate
  modified_base 10: mod_base = OTHER; note = 2'-O-methyladenosine-3'-phosphate
  modified_base 11: mod_base = OTHER; note = 2'-O-methyladenosine-3'-phosphate
  modified_base 12: mod_base = OTHER; note = 2'-O-methylcytidine-3'-phosphate
  modified_base 13: mod_base = OTHER; note = 2'-O-methyluridine-3'-phosphate
  modified_base 14: mod_base = OTHER; note = 2'-deoxy-2'-fluorouridine-3'-phosphate
  modified_base 15: mod_base = OTHER; note = 2'-O-methylguanosine-3'-phosphate
  modified_base 16: mod_base = OTHER; note = 2'-deoxy-2'-fluorocytidine-3'-phosphate
  modified_base 17: mod_base = OTHER; note = 2'-O-methyluridine-3'-phosphate
  modified_base 18: mod_base = OTHER; note = 2'-O-methylcytidine-3'-phosphate
  modified_base 19: mod_base = OTHER; note = 2'-O-methyladenosine-3'-phosphate
  modified_base 20: mod_base = OTHER; note = 2'-O-methylguanosine-3'-phosphate
  modified_base 21: mod_base = OTHER; note = 2'-O-methyladenosine-3'-phosphorothioate
  modified_base 22: mod_base = OTHER; note = 2'-O-methylguanosine-3'-phosphorothioate
  modified_base 23: mod_base = OTHER; note = 2'-O-methylcytidine
agaagaggtaacttgctcagagc

SEQ ID NO: 6068 - RNA, 23 nt, synthetic construct
  source 1..23: mol_type = other RNA
  modified_base 1: mod_base = OTHER; note = 2'-O-methyladenosine-3'-phosphorothioate
  modified_base 2: mod_base = OTHER; note = 2'-deoxy-2'-fluoroguanosine-3'-phosphorothioate
  modified_base 3: mod_base = OTHER; note = 2'-O-methyladenosine-3'-phosphate
  modified_base 4: mod_base = OTHER; note = 2'-O-methyladenosine-3'-phosphate
  modified_base 5: mod_base = OTHER; note = 2'-O-methyladenosine-3'-phosphate
  modified_base 6: mod_base = OTHER; note = 2'-deoxy-2'-fluorocytidine-3'-phosphate
  modified_base 7: mod_base = OTHER; note = 2'-O-methyluridine-3'-phosphate
  modified_base 8: mod_base = OTHER; note = 2'-deoxy-2'-fluoroguanosine-3'-phosphate
  modified_base 9: mod_base = OTHER; note = 2'-deoxy-2'-fluoroadenosine-3'-phosphate
  modified_base 10: mod_base = OTHER; note = 2'-O-methylguanosine-3'-phosphate
  modified_base 11: mod_base = OTHER; note = 2'-O-methylguanosine-3'-phosphate
  modified_base 12: mod_base = OTHER; note = 2'-O-methylguanosine-3'-phosphate
  modified_base 13: mod_base = OTHER; note = 2'-O-methyluridine-3'-phosphate
  modified_base 14: mod_base = OTHER; note = 2'-deoxy-2'-fluorocytidine-3'-phosphate
  modified_base 15: mod_base = OTHER; note = 2'-O-methyladenosine-3'-phosphate
  modified_base 16: mod_base = OTHER; note = 2'-deoxy-2'-fluoroguanosine-3'-phosphate
  modified_base 17: mod_base = OTHER; note = 2'-O-methyladenosine-3'-phosphate
  modified_base 18: mod_base = OTHER; note = 2'-O-methylguanosine-3'-phosphate
  modified_base 19: mod_base = OTHER; note = 2'-O-methylguanosine-3'-phosphate
  modified_base 20: mod_base = OTHER; note = 2'-O-methylguanosine-3'-phosphate
  modified_base 21: mod_base = OTHER; note = 2'-O-methyladenosine-3'-phosphorothioate
  modified_base 22: mod_base = OTHER; note = 2'-O-methyladenosine-3'-phosphorothioate
  modified_base 23: mod_base = OTHER; note = 2'-O-methylguanosine
agaaactgagggtcagagggaag

SEQ ID NO: 6069 - RNA, 23 nt, synthetic construct
  source 1..23: mol_type = other RNA
  modified_base 1: mod_base = OTHER; note = 2'-O-methyladenosine-3'-phosphorothioate
  modified_base 2: mod_base = OTHER; note = 2'-deoxy-2'-fluorocytidine-3'-phosphorothioate
  modified_base 3: mod_base = OTHER; note = 2'-O-methyladenosine-3'-phosphate
  modified_base 4: mod_base = OTHER; note = 2'-O-methyluridine-3'-phosphate
  modified_base 5: mod_base = OTHER; note = 2'-O-methyluridine-3'-phosphate
  modified_base 6: mod_base = OTHER; note = 2'-deoxy-2'-fluorouridine-3'-phosphate
  modified_base 7: mod_base = OTHER; note = 2'-O-methyluridine-3'-phosphate
  modified_base 8: mod_base = OTHER; note = 2'-deoxy-2'-fluoroadenosine-3'-phosphate
  modified_base 9: mod_base = OTHER; note = 2'-deoxy-2'-fluorocytidine-3'-phosphate
  modified_base 10: mod_base = OTHER; note = 2'-O-methyladenosine-3'-phosphate
  modified_base 11: mod_base = OTHER; note = 2'-O-methyladenosine-3'-phosphate
  modified_base 12: mod_base = OTHER; note = 2'-O-methyladenosine-3'-phosphate
  modified_base 13: mod_base = OTHER; note = 2'-O-methyluridine-3'-phosphate
  modified_base 14: mod_base = OTHER; note = 2'-deoxy-2'-fluoroadenosine-3'-phosphate
  modified_base 15: mod_base = OTHER; note = 2'-O-methyluridine-3'-phosphate
  modified_base 16: mod_base = OTHER; note = 2'-deoxy-2'-fluoroguanosine-3'-phosphate
  modified_base 17: mod_base = OTHER; note = 2'-O-methylguanosine-3'-phosphate
  modified_base 18: mod_base = OTHER; note = 2'-O-methyladenosine-3'-phosphate
  modified_base 19: mod_base = OTHER; note = 2'-O-methyladenosine-3'-phosphate
  modified_base 20: mod_base = OTHER; note = 2'-O-methyladenosine-3'-phosphate
  modified_base 21: mod_base = OTHER; note = 2'-O-methylcytidine-3'-phosphorothioate
  modified_base 22: mod_base = OTHER; note = 2'-O-methyluridine-3'-phosphorothioate
  modified_base 23: mod_base = OTHER; note = 2'-O-methylguanosine
acattttacaaatatggaaactg

SEQ ID NO: 6070 - RNA, 23 nt, synthetic construct
  source 1..23: mol_type = other RNA
  modified_base 1: mod_base = OTHER; note = 2'-O-methyladenosine-3'-phosphorothioate
  modified_base 2: mod_base = OTHER; note = 2'-deoxy-2'-fluoroguanosine-3'-phosphorothioate
  modified_base 3: mod_base = OTHER; note = 2'-O-methyluridine-3'-phosphate
  modified_base 4: mod_base = OTHER; note = 2'-O-methyluridine-3'-phosphate
  modified_base 5: mod_base = OTHER; note = 2'-O-methylguanosine-3'-phosphate
  modified_base 6: mod_base = OTHER; note = 2'-deoxy-2'-fluoroguanosine-3'-phosphate
  modified_base 7: mod_base = OTHER; note = 2'-O-methyluridine-3'-phosphate
  modified_base 8: mod_base = OTHER; note = 2'-deoxy-2'-fluoroadenosine-3'-phosphate
  modified_base 9: mod_base = OTHER; note = 2'-deoxy-2'-fluorouridine-3'-phosphate
  modified_base 10: mod_base = OTHER; note = 2'-O-methylguanosine-3'-phosphate
  modified_base 11: mod_base = OTHER; note = 2'-O-methyluridine-3'-phosphate
  modified_base 12: mod_base = OTHER; note = 2'-O-methyluridine-3'-phosphate
  modified_base 13: mod_base = OTHER; note = 2'-O-methyluridine-3'-phosphate
  modified_base 14: mod_base = OTHER; note = 2'-deoxy-2'-fluoroadenosine-3'-phosphate
  modified_base 15: mod_base = OTHER; note = 2'-O-methyluridine-3'-phosphate
  modified_base 16: mod_base = OTHER; note = 2'-deoxy-2'-fluorouridine-3'-phosphate
  modified_base 17: mod_base = OTHER; note = 2'-O-methylcytidine-3'-phosphate
  modified_base 18: mod_base = OTHER; note = 2'-O-methyluridine-3'-phosphate
  modified_base 19: mod_base = OTHER; note = 2'-O-methylcytidine-3'-phosphate
  modified_base 20: mod_base = OTHER; note = 2'-O-methyladenosine-3'-phosphate
  modified_base 21: mod_base = OTHER; note = 2'-O-methyluridine-3'-phosphorothioate
  modified_base 22: mod_base = OTHER; note = 2'-O-methyluridine-3'-phosphorothioate
  modified_base 23: mod_base = OTHER; note = 2'-O-methyluridine
agttggtatgtttattctcattt

SEQ ID NO: 6071 - RNA, 23 nt, synthetic construct
  source 1..23: mol_type = other RNA
  modified_base 1: mod_base = OTHER; note = 2'-O-methyladenosine-3'-phosphorothioate
  modified_base 2: mod_base = OTHER; note = 2'-deoxy-2'-fluorocytidine-3'-phosphorothioate
  modified_base 3: mod_base = OTHER; note = 2'-O-methyladenosine-3'-phosphate
  modified_base 4: mod_base = OTHER; note = 2'-O-methylcytidine-3'-phosphate
  modified_base 5: mod_base = OTHER; note = 2'-O-methyladenosine-3'-phosphate
  modified_base 6: mod_base = OTHER; note = 2'-deoxy-2'-fluoroadenosine-3'-phosphate
  modified_base 7: mod_base = OTHER; note = 2'-O-methyluridine-3'-phosphate
  modified_base 8: mod_base = OTHER; note = 2'-deoxy-2'-fluoroadenosine-3'-phosphate
  modified_base 9: mod_base = OTHER; note = 2'-deoxy-2'-fluorouridine-3'-phosphate
  modified_base 10: mod_base = OTHER; note = 2'-O-methylcytidine-3'-phosphate
  modified_base 11: mod_base = OTHER; note = 2'-O-methyluridine-3'-phosphate
  modified_base 12: mod_base = OTHER; note = 2'-O-methyluridine-3'-phosphate
  modified_base 13: mod_base = OTHER; note = 2'-O-methyluridine-3'-phosphate
  modified_base 14: mod_base = OTHER; note = 2'-deoxy-2'-fluoroadenosine-3'-phosphate
  modified_base 15: mod_base = OTHER; note = 2'-O-methyluridine-3'-phosphate
  modified_base 16: mod_base = OTHER; note = 2'-deoxy-2'-fluorouridine-3'-phosphate
  modified_base 17: mod_base = OTHER; note = 2'-O-methyladenosine-3'-phosphate
  modified_base 18: mod_base = OTHER; note = 2'-O-methyladenosine-3'-phosphate
  modified_base 19: mod_base = OTHER; note = 2'-O-methylguanosine-3'-phosphate
  modified_base 20: mod_base = OTHER; note = 2'-O-methyluridine-3'-phosphate
  modified_base 21: mod_base = OTHER; note = 2'-O-methyluridine-3'-phosphorothioate
  modified_base 22: mod_base = OTHER; note = 2'-O-methylguanosine-3'-phosphorothioate
  modified_base 23: mod_base = OTHER; note = 2'-O-methylguanosine
acacaatatctttattaagttgg

SEQ ID NO: 6072 - RNA, 23 nt, synthetic construct
  source 1..23: mol_type = other RNA
  modified_base 1: mod_base = OTHER; note = 2'-O-methyladenosine-3'-phosphorothioate
  modified_base 2: mod_base = OTHER; note = 2'-deoxy-2'-fluorouridine-3'-phosphorothioate
  modified_base 3: mod_base = OTHER; note = 2'-O-methyladenosine-3'-phosphate
  modified_base 4: mod_base = OTHER; note = 2'-O-methyluridine-3'-phosphate
  modified_base 5: mod_base = OTHER; note = 2'-O-methylcytidine-3'-phosphate
  modified_base 6: mod_base = OTHER; note = 2'-deoxy-2'-fluoroadenosine-3'-phosphate
  modified_base 7: mod_base = OTHER; note = 2'-O-methyladenosine-3'-phosphate
  modified_base 8: mod_base = OTHER; note = 2'-deoxy-2'-fluoroadenosine-3'-phosphate
  modified_base 9: mod_base = OTHER; note = 2'-deoxy-2'-fluorouridine-3'-phosphate
  modified_base 10: mod_base = OTHER; note = 2'-O-methyladenosine-3'-phosphate
  modified_base 11: mod_base = OTHER; note = 2'-O-methyluridine-3'-phosphate
  modified_base 12: mod_base = OTHER; note = 2'-O-methylcytidine-3'-phosphate
  modified_base 13: mod_base = OTHER; note = 2'-O-methyladenosine-3'-phosphate
  modified_base 14: mod_base = OTHER; note = 2'-deoxy-2'-fluorouridine-3'-phosphate
  modified_base 15: mod_base = OTHER; note = 2'-O-methyluridine-3'-phosphate
  modified_base 16: mod_base = OTHER; note = 2'-deoxy-2'-fluorocytidine-3'-phosphate
  modified_base 17: mod_base = OTHER; note = 2'-O-methyluridine-3'-phosphate
  modified_base 18: mod_base = OTHER; note = 2'-O-methyladenosine-3'-phosphate
  modified_base 19: mod_base = OTHER; note = 2'-O-methylguanosine-3'-phosphate
  modified_base 20: mod_base = OTHER; note = 2'-O-methyluridine-3'-phosphate
  modified_base 21: mod_base = OTHER; note = 2'-O-methylcytidine-3'-phosphorothioate
  modified_base 22: mod_base = OTHER; note = 2'-O-methyladenosine-3'-phosphorothioate
  modified_base 23: mod_base = OTHER; note = 2'-O-methylcytidine
atatcaaatatcattctagtcac

SEQ ID NO: 6073 - RNA, 23 nt, synthetic construct
  source 1..23: mol_type = other RNA
  modified_base 1: mod_base = OTHER; note = 2'-O-methyladenosine-3'-phosphorothioate
  modified_base 2: mod_base = OTHER; note = 2'-deoxy-2'-fluoroadenosine-3'-phosphorothioate
  modified_base 3: mod_base = OTHER; note = 2'-O-methylcytidine-3'-phosphate
  modified_base 4: mod_base = OTHER; note = 2'-O-methyluridine-3'-phosphate
  modified_base 5: mod_base = OTHER; note = 2'-O-methylguanosine-3'-phosphate
  modified_base 6: mod_base = OTHER; note = 2'-deoxy-2'-fluorocytidine-3'-phosphate
  modified_base 7: mod_base = OTHER; note = 2'-O-methyluridine-3'-phosphate
  modified_base 8: mod_base = OTHER; note = 2'-deoxy-2'-fluoroadenosine-3'-phosphate
  modified_base 9: mod_base = OTHER; note = 2'-deoxy-2'-fluorocytidine-3'-phosphate
  modified_base 10: mod_base = OTHER; note = 2'-O-methylcytidine-3'-phosphate
  modified_base 11: mod_base = OTHER; note = 2'-O-methyladenosine-3'-phosphate
  modified_base 12: mod_base = OTHER; note = 2'-O-methyluridine-3'-phosphate
  modified_base 13: mod_base = OTHER; note = 2'-O-methyluridine-3'-phosphate
  modified_base 14: mod_base = OTHER; note = 2'-deoxy-2'-fluorouridine-3'-phosphate
  modified_base 15: mod_base = OTHER; note = 2'-O-methyladenosine-3'-phosphate
  modified_base 16: mod_base = OTHER; note = 2'-deoxy-2'-fluoroadenosine-3'-phosphate
  modified_base 17: mod_base = OTHER; note = 2'-O-methyluridine-3'-phosphate
  modified_base 18: mod_base = OTHER; note = 2'-O-methyluridine-3'-phosphate
  modified_base 19: mod_base = OTHER; note = 2'-O-methyluridine-3'-phosphate
  modified_base 20: mod_base = OTHER; note = 2'-O-methylcytidine-3'-phosphate
  modified_base 21: mod_base = OTHER; note = 2'-O-methyluridine-3'-phosphorothioate
  modified_base 22: mod_base = OTHER; note = 2'-O-methyladenosine-3'-phosphorothioate
  modified_base 23: mod_base = OTHER; note = 2'-O-methyluridine
aactgctaccatttaatttctat

SEQ ID NO: 6074 - RNA, 23 nt, synthetic construct
  source 1..23: mol_type = other RNA
  modified_base 1: mod_base = OTHER; note = 2'-O-methyladenosine-3'-phosphorothioate
  modified_base 2: mod_base = OTHER; note = 2'-deoxy-2'-fluoroguanosine-3'-phosphorothioate
  modified_base 3: mod_base = OTHER; note = 2'-O-methyladenosine-3'-phosphate
  modified_base 4: mod_base = OTHER; note = 2'-O-methyluridine-3'-phosphate
  modified_base 5: mod_base = OTHER; note = 2'-O-methylcytidine-3'-phosphate
  modified_base 6: mod_base = OTHER; note = 2'-deoxy-2'-fluoroadenosine-3'-phosphate
  modified_base 7: mod_base = OTHER; note = 2'-O-methylguanosine-3'-phosphate
  modified_base 8: mod_base = OTHER; note = 2'-deoxy-2'-fluoroadenosine-3'-phosphate
  modified_base 9: mod_base = OTHER; note = 2'-deoxy-2'-fluoroadenosine-3'-phosphate
  modified_base 10: mod_base = OTHER; note = 2'-O-methyluridine-3'-phosphate
  modified_base 11: mod_base = OTHER; note = 2'-O-methyladenosine-3'-phosphate
  modified_base 12: mod_base = OTHER; note = 2'-O-methylguanosine-3'-phosphate
  modified_base 13: mod_base = OTHER; note = 2'-O-methyluridine-3'-phosphate
  modified_base 14: mod_base = OTHER; note = 2'-deoxy-2'-fluorouridine-3'-phosphate
  modified_base 15: mod_base = OTHER; note = 2'-O-methyladenosine-3'-phosphate
  modified_base 16: mod_base = OTHER; note = 2'-deoxy-2'-fluorouridine-3'-phosphate
  modified_base 17: mod_base = OTHER; note = 2'-O-methyladenosine-3'-phosphate
  modified_base 18: mod_base = OTHER; note = 2'-O-methylcytidine-3'-phosphate
  modified_base 19: mod_base = OTHER; note = 2'-O-methyluridine-3'-phosphate
  modified_base 20: mod_base = OTHER; note = 2'-O-methylguanosine-3'-phosphate
  modified_base 21: mod_base = OTHER; note = 2'-O-methylcytidine-3'-phosphorothioate
  modified_base 22: mod_base = OTHER; note = 2'-O-methyluridine-3'-phosphorothioate
  modified_base 23: mod_base = OTHER; note = 2'-O-methyladenosine
agatcagaatagttatactgcta

SEQ ID NO: 6075 - RNA, 23 nt, synthetic construct
  source 1..23: mol_type = other RNA
  modified_base 1: mod_base = OTHER; note = 2'-O-methyladenosine-3'-phosphorothioate
  modified_base 2: mod_base = OTHER; note = 2'-deoxy-2'-fluorouridine-3'-phosphorothioate
  modified_base 3: mod_base = OTHER; note = 2'-O-methyladenosine-3'-phosphate
  modified_base 4: mod_base = OTHER; note = 2'-O-methylguanosine-3'-phosphate
  modified_base 5: mod_base = OTHER; note = 2'-O-methylguanosine-3'-phosphate
  modified_base 6: mod_base = OTHER; note = 2'-deoxy-2'-fluoroadenosine-3'-phosphate
  modified_base 7: mod_base = OTHER; note = 2'-O-methyladenosine-3'-phosphate
  modified_base 8: mod_base = OTHER; note = 2'-deoxy-2'-fluorouridine-3'-phosphate
  modified_base 9: mod_base = OTHER; note = 2'-deoxy-2'-fluoroadenosine-3'-phosphate
  modified_base 10: mod_base = OTHER; note = 2'-O-methyluridine-3'-phosphate
  modified_base 11: mod_base = OTHER; note = 2'-O-methyluridine-3'-phosphate
  modified_base 12: mod_base = OTHER; note = 2'-O-methyladenosine-3'-phosphate
  modified_base 13: mod_base = OTHER; note = 2'-O-methyladenosine-3'-phosphate
  modified_base 14: mod_base = OTHER; note = 2'-deoxy-2'-fluorouridine-3'-phosphate
  modified_base 15: mod_base = OTHER; note = 2'-O-methylguanosine-3'-phosphate
  modified_base 16: mod_base = OTHER; note = 2'-deoxy-2'-fluorouridine-3'-phosphate
  modified_base 17: mod_base = OTHER; note = 2'-O-methylcytidine-3'-phosphate
  modified_base 18: mod_base = OTHER; note = 2'-O-methyladenosine-3'-phosphate
  modified_base 19: mod_base = OTHER; note = 2'-O-methylguanosine-3'-phosphate
  modified_base 20: mod_base = OTHER; note = 2'-O-methyluridine-3'-phosphate
  modified_base 21: mod_base = OTHER; note = 2'-O-methylguanosine-3'-phosphorothioate
  modified_base 22: mod_base = OTHER; note = 2'-O-methyladenosine-3'-phosphorothioate
  modified_base 23: mod_base = OTHER; note = 2'-O-methyluridine
ataggaatattaatgtcagtgat

SEQ ID NO: 6076 - RNA, 23 nt, synthetic construct
  source 1..23: mol_type = other RNA
  modified_base 1: mod_base = OTHER; note = 2'-O-methyladenosine-3'-phosphorothioate
  modified_base 2: mod_base = OTHER; note = 2'-deoxy-2'-fluoroguanosine-3'-phosphorothioate
  modified_base 3: mod_base = OTHER; note = 2'-O-methyluridine-3'-phosphate
  modified_base 4: mod_base = OTHER; note = 2'-O-methylguanosine-3'-phosphate
  modified_base 5: mod_base = OTHER; note = 2'-O-methyladenosine-3'-phosphate
  modified_base 6: mod_base = OTHER; note = 2'-deoxy-2'-fluoroguanosine-3'-phosphate
  modified_base 7: mod_base = OTHER; note = 2'-O-methylcytidine-3'-phosphate
  modified_base 8: mod_base = OTHER; note = 2'-deoxy-2'-fluoroadenosine-3'-phosphate
  modified_base 9: mod_base = OTHER; note = 2'-deoxy-2'-fluoroadenosine-3'-phosphate
  modified_base 10: mod_base = OTHER; note = 2'-O-methyladenosine-3'-phosphate
  modified_base 11: mod_base = OTHER; note = 2'-O-methylguanosine-3'-phosphate
  modified_base 12: mod_base = OTHER; note = 2'-O-methyladenosine-3'-phosphate
  modified_base 13: mod_base = OTHER; note = 2'-O-methyladenosine-3'-phosphate
  modified_base 14: mod_base = OTHER; note = 2'-deoxy-2'-fluorouridine-3'-phosphate
  modified_base 15: mod_base = OTHER; note = 2'-O-methyladenosine-3'-phosphate
  modified_base 16: mod_base = OTHER; note = 2'-deoxy-2'-fluoroadenosine-3'-phosphate
  modified_base 17: mod_base = OTHER; note = 2'-O-methyluridine-3'-phosphate
  modified_base 18: mod_base = OTHER; note = 2'-O-methyladenosine-3'-phosphate
  modified_base 19: mod_base = OTHER; note = 2'-O-methyladenosine-3'-phosphate
  modified_base 20: mod_base = OTHER; note = 2'-O-methylcytidine-3'-phosphate
  modified_base 21: mod_base = OTHER; note = 2'-O-methyladenosine-3'-phosphorothioate
  modified_base 22: mod_base = OTHER; note = 2'-O-methyladenosine-3'-phosphorothioate
  modified_base 23: mod_base = OTHER; note = 2'-O-methyluridine
agtgagcaaagaataataacaat

SEQ ID NO: 6077 - RNA, 23 nt, synthetic construct
  source 1..23: mol_type = other RNA
  modified_base 1: mod_base = OTHER; note = 2'-O-methyladenosine-3'-phosphorothioate
  modified_base 2: mod_base = OTHER; note = 2'-deoxy-2'-fluoroadenosine-3'-phosphorothioate
  modified_base 3: mod_base = OTHER; note = 2'-O-methyladenosine-3'-phosphate
  modified_base 4: mod_base = OTHER; note = 2'-O-methylcytidine-3'-phosphate
  modified_base 5: mod_base = OTHER; note = 2'-O-methyladenosine-3'-phosphate
  modified_base 6: mod_base = OTHER; note = 2'-deoxy-2'-fluoroguanosine-3'-phosphate
  modified_base 7: mod_base = OTHER; note = 2'-O-methylcytidine-3'-phosphate
  modified_base 8: mod_base = OTHER; note = 2'-deoxy-2'-fluoroadenosine-3'-phosphate
  modified_base 9: mod_base = OTHER; note = 2'-deoxy-2'-fluoroadenosine-3'-phosphate
  modified_base 10: mod_base = OTHER; note = 2'-O-methyladenosine-3'-phosphate
  modified_base 11: mod_base = OTHER; note = 2'-O-methyladenosine-3'-phosphate
  modified_base 12: mod_base = OTHER; note = 2'-O-methylcytidine-3'-phosphate
  modified_base 13: mod_base = OTHER; note = 2'-O-methyladenosine-3'-phosphate
  modified_base 14: mod_base = OTHER; note = 2'-deoxy-2'-fluoroadenosine-3'-phosphate
  modified_base 15: mod_base = OTHER; note = 2'-O-methylguanosine-3'-phosphate
  modified_base 16: mod_base = OTHER; note = 2'-deoxy-2'-fluoroadenosine-3'-phosphate
  modified_base 17: mod_base = OTHER; note = 2'-O-methylguanosine-3'-phosphate
  modified_base 18: mod_base = OTHER; note = 2'-O-methyluridine-3'-phosphate
  modified_base 19: mod_base = OTHER; note = 2'-O-methyluridine-3'-phosphate
  modified_base 20: mod_base = OTHER; note = 2'-O-methylguanosine-3'-phosphate
  modified_base 21: mod_base = OTHER; note = 2'-O-methyluridine-3'-phosphorothioate
  modified_base 22: mod_base = OTHER; note = 2'-O-methyladenosine-3'-phosphorothioate
  modified_base 23: mod_base = OTHER; note = 2'-O-methyluridine
aaacagcaaaacaagagttgtat

SEQ ID NO: 6078 - RNA, 23 nt, synthetic construct
  source 1..23: mol_type = other RNA
  modified_base 1: mod_base = OTHER; note = 2'-O-methyladenosine-3'-phosphorothioate
  modified_base 2: mod_base = OTHER; note = 2'-deoxy-2'-fluorouridine-3'-phosphorothioate
  modified_base 3: mod_base = OTHER; note = 2'-O-methyladenosine-3'-phosphate
  modified_base 4: mod_base = OTHER; note = 2'-O-methyladenosine-3'-phosphate
  modified_base 5: mod_base = OTHER; note = 2'-O-methyladenosine-3'-phosphate
  modified_base 6: mod_base = OTHER; note = 2'-deoxy-2'-fluorocytidine-3'-phosphate
  modified_base 7: mod_base = OTHER; note = 2'-O-methylcytidine-3'-phosphate
  modified_base 8: mod_base = OTHER; note = 2'-deoxy-2'-fluorouridine-3'-phosphate
  modified_base 9: mod_base = OTHER; note = 2'-deoxy-2'-fluoroadenosine-3'-phosphate
  modified_base 10: mod_base = OTHER; note = 2'-O-methylcytidine-3'-phosphate
  modified_base 11: mod_base = OTHER; note = 2'-O-methyladenosine-3'-phosphate
  modified_base 12: mod_base = OTHER; note = 2'-O-methyluridine-3'-phosphate
  modified_base 13: mod_base = OTHER; note = 2'-O-methyladenosine-3'-phosphate
  modified_base 14: mod_base = OTHER; note = 2'-deoxy-2'-fluoroadenosine-3'-phosphate
  modified_base 15: mod_base = OTHER; note = 2'-O-methyladenosine-3'-phosphate
  modified_base 16: mod_base = OTHER; note = 2'-deoxy-2'-fluoroguanosine-3'-phosphate
  modified_base 17: mod_base = OTHER; note = 2'-O-methyladenosine-3'-phosphate
  modified_base 18: mod_base = OTHER; note = 2'-O-methylguanosine-3'-phosphate
  modified_base 19: mod_base = OTHER; note = 2'-O-methylguanosine-3'-phosphate
  modified_base 20: mod_base = OTHER; note = 2'-O-methylguanosine-3'-phosphate
  modified_base 21: mod_base = OTHER; note = 2'-O-methylcytidine-3'-phosphorothioate
  modified_base 22: mod_base = OTHER; note = 2'-O-methyladenosine-3'-phosphorothioate
  modified_base 23: mod_base = OTHER; note = 2'-O-methylguanosine
ataaacctacataaagagggcag

SEQ ID NO: 6079 - RNA, 23 nt, synthetic construct
  source 1..23: mol_type = other RNA
  modified_base 1: mod_base = OTHER; note = 2'-O-methyladenosine-3'-phosphorothioate
  modified_base 2: mod_base = OTHER; note = 2'-deoxy-2'-fluoroadenosine-3'-phosphorothioate
  modified_base 3: mod_base = OTHER; note = 2'-O-methylguanosine-3'-phosphate
  modified_base 4: mod_base = OTHER; note = 2'-O-methyladenosine-3'-phosphate
  modified_base 5: mod_base = OTHER; note = 2'-O-methylcytidine-3'-phosphate
  modified_base 6: mod_base = OTHER; note = 2'-deoxy-2'-fluoroadenosine-3'-phosphate
  modified_base 7: mod_base = OTHER; note = 2'-O-methyluridine-3'-phosphate
  modified_base 8: mod_base = OTHER; note = 2'-deoxy-2'-fluorouridine-3'-phosphate
  modified_base 9: mod_base = OTHER; note = 2'-deoxy-2'-fluorouridine-3'-phosphate
  modified_base 10: mod_base = OTHER; note = 2'-O-methylguanosine-3'-phosphate
  modified_base 11: mod_base = OTHER; note = 2'-O-methyladenosine-3'-phosphate
  modified_base 12: mod_base = OTHER; note = 2'-O-methylguanosine-3'-phosphate
  modified_base 13: mod_base = OTHER; note = 2'-O-methyluridine-3'-phosphate
  modified_base 14: mod_base = OTHER; note = 2'-deoxy-2'-fluorocytidine-3'-phosphate
  modified_base 15: mod_base = OTHER; note = 2'-O-methylcytidine-3'-phosphate
  modified_base 16: mod_base = OTHER; note = 2'-deoxy-2'-fluoroguanosine-3'-phosphate
  modified_base 17: mod_base = OTHER; note = 2'-O-methyladenosine-3'-phosphate
  modified_base 18: mod_base = OTHER; note = 2'-O-methylguanosine-3'-phosphate
  modified_base 19: mod_base = OTHER; note = 2'-O-methyluridine-3'-phosphate
  modified_base 20: mod_base = OTHER; note = 2'-O-methyladenosine-3'-phosphate
  modified_base 21: mod_base = OTHER; note = 2'-O-methyluridine-3'-phosphorothioate
  modified_base 22: mod_base = OTHER; note = 2'-O-methyladenosine-3'-phosphorothioate
  modified_base 23: mod_base = OTHER; note = 2'-O-methyluridine
aagacatttgagtccgagtatat

SEQ ID NO: 6080 - RNA, 23 nt, synthetic construct
  source 1..23: mol_type = other RNA
  modified_base 1: mod_base = OTHER; note = 2'-O-methyladenosine-3'-phosphorothioate
  modified_base 2: mod_base = OTHER; note = 2'-deoxy-2'-fluoroadenosine-3'-phosphorothioate
  modified_base 3: mod_base = OTHER; note = 2'-O-methyluridine-3'-phosphate
  modified_base 4: mod_base = OTHER; note = 2'-O-methylguanosine-3'-phosphate
  modified_base 5: mod_base = OTHER; note = 2'-O-methyladenosine-3'-phosphate
  modified_base 6: mod_base = OTHER; note = 2'-deoxy-2'-fluorocytidine-3'-phosphate
  modified_base 7: mod_base = OTHER; note = 2'-O-methylcytidine-3'-phosphate
  modified_base 8: mod_base = OTHER; note = 2'-deoxy-2'-fluoroadenosine-3'-phosphate
  modified_base 9: mod_base = OTHER; note = 2'-deoxy-2'-fluorocytidine-3'-phosphate
  modified_base 10: mod_base = OTHER; note = 2'-O-methyluridine-3'-phosphate
  modified_base 11: mod_base = OTHER; note = 2'-O-methyluridine-3'-phosphate
  modified_base 12: mod_base = OTHER; note = 2'-O-methylcytidine-3'-phosphate
  modified_base 13: mod_base = OTHER; note = 2'-O-methyladenosine-3'-phosphate
  modified_base 14: mod_base = OTHER; note = 2'-deoxy-2'-fluorouridine-3'-phosphate
  modified_base 15: mod_base = OTHER; note = 2'-O-methyluridine-3'-phosphate
  modified_base 16: mod_base = OTHER; note = 2'-deoxy-2'-fluorouridine-3'-phosphate
  modified_base 17: mod_base = OTHER; note = 2'-O-methylguanosine-3'-phosphate
  modified_base 18: mod_base = OTHER; note = 2'-O-methylguanosine-3'-phosphate
  modified_base 19: mod_base = OTHER; note = 2'-O-methyluridine-3'-phosphate
  modified_base 20: mod_base = OTHER; note = 2'-O-methylguanosine-3'-phosphate
  modified_base 21: mod_base = OTHER; note = 2'-O-methyluridine-3'-phosphorothioate
  modified_base 22: mod_base = OTHER; note = 2'-O-methylcytidine-3'-phosphorothioate
  modified_base 23: mod_base = OTHER; note = 2'-O-methyluridine
aatgaccacttcatttggtgtct

SEQ ID NO: 6081 - RNA, 23 nt, synthetic construct
  source 1..23: mol_type = other RNA
  modified_base 1: mod_base = OTHER; note = 2'-O-methyladenosine-3'-phosphorothioate
  modified_base 2: mod_base = OTHER; note = 2'-deoxy-2'-fluoroadenosine-3'-phosphorothioate
  modified_base 3: mod_base = OTHER; note = 2'-O-methylguanosine-3'-phosphate
  modified_base 4: mod_base = OTHER; note = 2'-O-methyladenosine-3'-phosphate
  modified_base 5: mod_base = OTHER; note = 2'-O-methyladenosine-3'-phosphate
  modified_base 6: mod_base = OTHER; note = 2'-deoxy-2'-fluorouridine-3'-phosphate
  modified_base 7: mod_base = OTHER; note = 2'-O-methyladenosine-3'-phosphate
  modified_base 8: mod_base = OTHER; note = 2'-deoxy-2'-fluorouridine-3'-phosphate
  modified_base 9: mod_base = OTHER; note = 2'-deoxy-2'-fluoroadenosine-3'-phosphate
  modified_base 10: mod_base = OTHER; note = 2'-O-methylcytidine-3'-phosphate
  modified_base 11: mod_base = OTHER; note = 2'-O-methyluridine-3'-phosphate
  modified_base 12: mod_base = OTHER; note = 2'-O-methylguanosine-3'-phosphate
  modified_base 13: mod_base = OTHER; note = 2'-O-methyladenosine-3'-phosphate
  modified_base 14: mod_base = OTHER; note = 2'-deoxy-2'-fluorouridine-3'-phosphate
  modified_base 15: mod_base = OTHER; note = 2'-O-methyluridine-3'-phosphate
  modified_base 16: mod_base = OTHER; note = 2'-deoxy-2'-fluorouridine-3'-phosphate
  modified_base 17: mod_base = OTHER; note = 2'-O-methylguanosine-3'-phosphate
  modified_base 18: mod_base = OTHER; note = 2'-O-methylcytidine-3'-phosphate
  modified_base 19: mod_base = OTHER; note = 2'-O-methyluridine-3'-phosphate
  modified_base 20: mod_base = OTHER; note = 2'-O-methyladenosine-3'-phosphate
  modified_base 21: mod_base = OTHER; note = 2'-O-methylcytidine-3'-phosphorothioate
  modified_base 22: mod_base = OTHER; note = 2'-O-methyluridine-3'-phosphorothioate
  modified_base 23: mod_base = OTHER; note = 2'-O-methyladenosine
aagaatatactgatttgctacta

SEQ ID NO: 6082 - RNA, 23 nt, synthetic construct
  source 1..23: mol_type = other RNA
  modified_base 1: mod_base = OTHER; note = 2'-O-methyladenosine-3'-phosphorothioate
  modified_base 2: mod_base = OTHER; note = 2'-deoxy-2'-fluoroguanosine-3'-phosphorothioate
  modified_base 3: mod_base = OTHER; note = 2'-O-methyluridine-3'-phosphate
  modified_base 4: mod_base = OTHER; note = 2'-O-methylguanosine-3'-phosphate
  modified_base 5: mod_base = OTHER; note = 2'-O-methyladenosine-3'-phosphate
  modified_base 6: mod_base = OTHER; note = 2'-deoxy-2'-fluoroadenosine-3'-phosphate
  modified_base 7: mod_base = OTHER; note = 2'-O-methylguanosine-3'-phosphate
  modified_base 8: mod_base = OTHER; note = 2'-deoxy-2'-fluoroadenosine-3'-phosphate
  modified_base 9: mod_base = OTHER; note = 2'-deoxy-2'-fluorouridine-3'-phosphate
  modified_base 10: mod_base = OTHER; note = 2'-O-methyluridine-3'-phosphate
  modified_base 11: mod_base = OTHER; note = 2'-O-methyladenosine-3'-phosphate
  modified_base 12: mod_base = OTHER; note = 2'-O-methyladenosine-3'-phosphate
  modified_base 13: mod_base = OTHER; note = 2'-O-methyluridine-3'-phosphate
  modified_base 14: mod_base = OTHER; note = 2'-deoxy-2'-fluoroadenosine-3'-phosphate
  modified_base 15: mod_base = OTHER; note = 2'-O-methyluridine-3'-phosphate
  modified_base 16: mod_base = OTHER; note = 2'-deoxy-2'-fluorouridine-3'-phosphate
  modified_base 17: mod_base = OTHER; note = 2'-O-methylcytidine-3'-phosphate
  modified_base 18: mod_base = OTHER; note = 2'-O-methylcytidine-3'-phosphate
  modified_base 19: mod_base = OTHER; note = 2'-O-methyluridine-3'-phosphate
  modified_base 20: mod_base = OTHER; note = 2'-O-methyluridine-3'-phosphate
  modified_base 21: mod_base = OTHER; note = 2'-O-methylguanosine-3'-phosphorothioate
  modified_base 22: mod_base = OTHER; note = 2'-O-methyladenosine-3'-phosphorothioate
  modified_base 23: mod_base = OTHER; note = 2'-O-methyladenosine
agtgaagattaatattccttgaa

SEQ ID NO: 6083 - RNA, 23 nt, synthetic construct
  source 1..23: mol_type = other RNA
  modified_base 1: mod_base = OTHER; note = 2'-O-methyladenosine-3'-phosphorothioate
  modified_base 2: mod_base = OTHER; note = 2'-deoxy-2'-fluoroadenosine-3'-phosphorothioate
  modified_base 3: mod_base = OTHER; note = 2'-O-methyladenosine-3'-phosphate
  modified_base 4: mod_base = OTHER; note = 2'-O-methyladenosine-3'-phosphate
  modified_base 5: mod_base = OTHER; note = 2'-O-methyladenosine-3'-phosphate
  modified_base 6: mod_base = OTHER; note = 2'-deoxy-2'-fluorouridine-3'-phosphate
  modified_base 7: mod_base = OTHER; note = 2'-O-methyluridine-3'-phosphate
  modified_base 8: mod_base = OTHER; note = 2'-deoxy-2'-fluorocytidine-3'-phosphate
  modified_base 9: mod_base = OTHER; note = 2'-deoxy-2'-fluoroadenosine-3'-phosphate
  modified_base 10: mod_base = OTHER; note = 2'-O-methyladenosine-3'-phosphate
  modified_base 11: mod_base = OTHER; note = 2'-O-methyladenosine-3'-phosphate
  modified_base 12: mod_base = OTHER; note = 2'-O-methyladenosine-3'-phosphate
  modified_base 13: mod_base = OTHER; note = 2'-O-methyluridine-3'-phosphate
  modified_base 14: mod_base = OTHER; note = 2'-deoxy-2'-fluorouridine-3'-phosphate
  modified_base 15: mod_base = OTHER; note = 2'-O-methyluridine-3'-phosphate
  modified_base 16: mod_base = OTHER; note = 2'-deoxy-2'-fluoroguanosine-3'-phosphate
  modified_base 17: mod_base = OTHER; note = 2'-O-methylguanosine-3'-phosphate
  modified_base 18: mod_base = OTHER; note = 2'-O-methylguanosine-3'-phosphate
  modified_base 19: mod_base = OTHER; note = 2'-O-methyluridine-3'-phosphate
  modified_base 20: mod_base = OTHER; note = 2'-O-methylguanosine-3'-phosphate
  modified_base 21: mod_base = OTHER; note = 2'-O-methyladenosine-3'-phosphorothioate
  modified_base 22: mod_base = OTHER; note = 2'-O-methyladenosine-3'-phosphorothioate
  modified_base 23: mod_base = OTHER; note = 2'-O-methylguanosine
aaaaattcaaaatttgggtgaag

SEQ ID NO: 6084 - RNA, 23 nt, synthetic construct
  source 1..23: mol_type = other RNA
  modified_base 1: mod_base = OTHER; note = 2'-O-methyladenosine-3'-phosphorothioate
  modified_base 2: mod_base = OTHER; note = 2'-deoxy-2'-fluorouridine-3'-phosphorothioate
  modified_base 3: mod_base = OTHER; note = 2'-O-methyluridine-3'-phosphate
  modified_base 4: mod_base = OTHER; note = 2'-O-methyluridine-3'-phosphate
  modified_base 5: mod_base = OTHER; note = 2'-O-methyladenosine-3'-phosphate
  modified_base 6: mod_base = OTHER; note = 2'-deoxy-2'-fluorouridine-3'-phosphate
  modified_base 7: mod_base = OTHER; note = 2'-O-methyluridine-3'-phosphate
  modified_base 8: mod_base = OTHER; note = 2'-deoxy-2'-fluorocytidine-3'-phosphate
  modified_base 9: mod_base = OTHER; note = 2'-deoxy-2'-fluoroadenosine-3'-phosphate
  modified_base 10: mod_base = OTHER; note = 2'-O-methyladenosine-3'-phosphate
  modified_base 11: mod_base = OTHER; note = 2'-O-methyluridine-3'-phosphate
  modified_base 12: mod_base = OTHER; note = 2'-O-methylguanosine-3'-phosphate
  modified_base 13: mod_base = OTHER; note = 2'-O-methyladenosine-3'-phosphate
  modified_base 14: mod_base = OTHER; note = 2'-deoxy-2'-fluoroadenosine-3'-phosphate
  modified_base 15: mod_base = OTHER; note = 2'-O-methyladenosine-3'-phosphate
  modified_base 16: mod_base = OTHER; note = 2'-deoxy-2'-fluorouridine-3'-phosphate
  modified_base 17: mod_base = OTHER; note = 2'-O-methylcytidine-3'-phosphate
  modified_base 18: mod_base = OTHER; note = 2'-O-methyladenosine-3'-phosphate
  modified_base 19: mod_base = OTHER; note = 2'-O-methylcytidine-3'-phosphate
  modified_base 20: mod_base = OTHER; note = 2'-O-methyluridine-3'-phosphate
  modified_base 21: mod_base = OTHER; note = 2'-O-methylcytidine-3'-phosphorothioate
  modified_base 22: mod_base = OTHER; note = 2'-O-methylguanosine-3'-phosphorothioate
  modified_base 23: mod_base = OTHER; note = 2'-O-methyladenosine
atttattcaatgaaatcactcga

SEQ ID NO: 6085 - RNA, 23 nt, synthetic construct
  source 1..23: mol_type = other RNA
  modified_base 1: mod_base = OTHER; note = 2'-O-methyladenosine-3'-phosphorothioate
  modified_base 2: mod_base = OTHER; note = 2'-deoxy-2'-fluoroadenosine-3'-phosphorothioate
  modified_base 3: mod_base = OTHER; note = 2'-O-methylguanosine-3'-phosphate
  modified_base 4: mod_base = OTHER; note = 2'-O-methyladenosine-3'-phosphate
  modified_base 5: mod_base = OTHER; note = 2'-O-methyladenosine-3'-phosphate
  modified_base 6: mod_base = OTHER; note = 2'-deoxy-2'-fluoroguanosine-3'-phosphate
  modified_base 7: mod_base = OTHER; note = 2'-O-methyluridine-3'-phosphate
  modified_base 8: mod_base = OTHER; note = 2'-deoxy-2'-fluorocytidine-3'-phosphate
  modified_base 9: mod_base = OTHER; note = 2'-deoxy-2'-fluoroadenosine-3'-phosphate
  modified_base 10: mod_base = OTHER; note = 2'-O-methylguanosine-3'-phosphate
  modified_base 11: mod_base = OTHER; note = 2'-O-methyluridine-3'-phosphate
  modified_base 12: mod_base = OTHER; note = 2'-O-methyladenosine-3'-phosphate
  modified_base 13: mod_base = OTHER; note = 2'-O-methylguanosine-3'-phosphate
  modified_base 14: mod_base = OTHER; note = 2'-deoxy-2'-fluoroadenosine-3'-phosphate
  modified_base 15: mod_base = OTHER; note = 2'-O-methyladenosine-3'-phosphate
  modified_base 16: mod_base = OTHER; note = 2'-deoxy-2'-fluorouridine-3'-phosphate
  modified_base 17: mod_base = OTHER; note = 2'-O-methyluridine-3'-phosphate
  modified_base 18: mod_base = OTHER; note = 2'-O-methyluridine-3'-phosphate
  modified_base 19: mod_base = OTHER; note = 2'-O-methyluridine-3'-phosphate
  modified_base 20: mod_base = OTHER; note = 2'-O-methyladenosine-3'-phosphate
  modified_base 21: mod_base = OTHER; note = 2'-O-methyluridine-3'-phosphorothioate
  modified_base 22: mod_base = OTHER; note = 2'-O-methyluridine-3'-phosphorothioate
  modified_base 23: mod_base = OTHER; note = 2'-O-methylcytidine
aagaagtcagtagaattttattc

SEQ ID NO: 6086 - RNA, 23 nt, synthetic construct
  source 1..23: mol_type = other RNA
ctctgcttctactcctcctgctc

SEQ ID NO: 6087 - RNA, 23 nt, synthetic construct
  source 1..23: mol_type = other RNA
cagtgcggatcgtttcgcaactg

SEQ ID NO: 6088 - RNA, 23 nt, synthetic construct
  source 1..23: mol_type = other RNA
cgcaactgcttgccactcgtccc

SEQ ID NO: 6089 - RNA, 23 nt, synthetic construct
  source 1..23: mol_type = other RNA
gcctggctgtttttccatttccc

SEQ ID NO: 6090 - RNA, 23 nt, synthetic construct
  source 1..23: mol_type = other RNA
cgccaccctttctggtcatctcc

SEQ ID NO: 6091 - RNA, 23 nt, synthetic construct
  source 1..23: mol_type = other RNA
gatggcttcgaccacaacctgca

SEQ ID NO: 6092 - RNA, 23 nt, synthetic construct
  source 1..23: mol_type = other RNA
cggacgagtatcagcttttcgag

SEQ ID NO: 6093 - RNA, 23 nt, synthetic construct
  source 1..23: mol_type = other RNA
tgtatgaaaattcctactggaca

SEQ ID NO: 6094 - RNA, 23 nt, synthetic construct
  source 1..23: mol_type = other RNA
atgctgccaaaattatcaacacc

SEQ ID NO: 6095 - RNA, 23 nt, synthetic construct
  source 1..23: mol_type = other RNA
ttctgctagggatcatcagaaac

SEQ ID NO: 6096 - RNA, 23 nt, synthetic construct
  source 1..23: mol_type = other RNA
agaatctgccgtcttttgaagca

SEQ ID NO: 6097 - RNA, 23 nt, synthetic construct
  source 1..23: mol_type = other RNA
accctaatattgtgcgacttcat

SEQ ID NO: 6098 - RNA, 23 nt, synthetic construct
  source 1..23: mol_type = other RNA
acttggtgtttgatttagttact

SEQ ID NO: 6099 - RNA, 23 nt, synthetic construct
  source 1..23: mol_type = other RNA
actacagtgaagctgatgccagt

SEQ ID NO: 6100 - RNA, 23 nt, synthetic construct
  source 1..23: mol_type = other RNA
tgccagtcattgcattcagcaga

SEQ ID NO: 6101 - RNA, 23 nt, synthetic construct
  source 1..23: mol_type = other RNA
aagcctgagaatttgcttttagc

SEQ ID NO: 6102 - RNA, 23 nt, synthetic construct
  source 1..23: mol_type = other RNA
cagctgtgaaattggcagacttt

SEQ ID NO: 6103 - RNA, 23 nt, synthetic construct
  source 1..23: mol_type = other RNA
tatctttctccagaagttttacg

SEQ ID NO: 6104 - RNA, 23 nt, synthetic construct
  source 1..23: mol_type = other RNA
ttttacgtaaagatccttatgga

SEQ ID NO: 6105 - RNA, 23 nt, synthetic construct
  source 1..23: mol_type = other RNA
tcattctctatattctacttgtg

SEQ ID NO: 6106 - RNA, 23 nt, synthetic construct
  source 1..23: mol_type = other RNA
gaccaacacagactctatcagca

SEQ ID NO: 6107 - RNA, 23 nt, synthetic construct
  source 1..23: mol_type = other RNA
ctggagcttatgattttccatca

SEQ ID NO: 6108 - RNA, 23 nt, synthetic construct
  source 1..23: mol_type = other RNA
gacctcatcaataaaatgcttac

SEQ ID NO: 6109 - RNA, 23 nt, synthetic construct
  source 1..23: mol_type = other RNA
agcacccatggatctgtcaacgt

SEQ ID NO: 6110 - RNA, 23 nt, synthetic construct
  source 1..23: mol_type = other RNA
gtcaacgttctactgttgcttcc

SEQ ID NO: 6111 - RNA, 23 nt, synthetic construct
  source 1..23: mol_type = other RNA
tgcttccatgatgcacagacagg

SEQ ID NO: 6112 - RNA, 23 nt, synthetic construct
  source 1..23: mol_type = other RNA
gactgcttgaagaaatttaatgc

SEQ ID NO: 6113 - RNA, 23 nt, synthetic construct
  source 1..23: mol_type = other RNA
taatgctagaagaaaactaaagg

SEQ ID NO: 6114 - RNA, 23 nt, synthetic construct
  source 1..23: mol_type = other RNA
ggtgccatcttgacaactatgct

SEQ ID NO: 6115 - RNA, 23 nt, synthetic construct
  source 1..23: mol_type = other RNA
atgctggctacaaggaatttctc

SEQ ID NO: 6116 - RNA, 23 nt, synthetic construct
  source 1..23: mol_type = other RNA
ctcagcagccaagagtttgttga

SEQ ID NO: 6117 - RNA, 23 nt, synthetic construct
  source 1..23: mol_type = other RNA
gaagaaaccagatggagtaaaga

SEQ ID NO: 6118 - RNA, 23 nt, synthetic construct
  source 1..23: mol_type = other RNA
aagataaacaacaaagccaacgt

SEQ ID NO: 6119 - RNA, 23 nt, synthetic construct
  source 1..23: mol_type = other RNA
aactactgtaatccacaaccctg

SEQ ID NO: 6120 - RNA, 23 nt, synthetic construct
  source 1..23: mol_type = other RNA
cctgatggaaacaaggagtcaac

SEQ ID NO: 6121 - RNA, 23 nt, synthetic construct
  source 1..23: mol_type = other RNA
tgagagttcaaatacaacaattg

SEQ ID NO: 6122 - RNA, 23 nt, synthetic construct
  source 1..23: mol_type = other RNA
atgaagatgtgaaagcacgaaag

SEQ ID NO: 6123 - RNA, 23 nt, synthetic construct
  source 1..23: mol_type = other RNA
cacgaaagcaagagattatcaaa

SEQ ID NO: 6124 - RNA, 23 nt, synthetic construct
  source 1..23: mol_type = other RNA
caaagtcactgaacaactgatcg

SEQ ID NO: 6125 - RNA, 23 nt, synthetic construct
  source 1..23: mol_type = other RNA
actgatcgaagctatcaacaatg

SEQ ID NO: 6126 - RNA, 23 nt, synthetic construct
  source 1..23: mol_type = other RNA
gggactttgaagcctacacaaaa

SEQ ID NO: 6127 - RNA, 23 nt, synthetic construct
  source 1..23: mol_type = other RNA
cttactgcttttgaacctgaagc

SEQ ID NO: 6128 - RNA, 23 nt, synthetic construct
  source 1..23: mol_type = other RNA
ctgaagctttgggtaatttagtg

SEQ ID NO: 6129 - RNA, 23 nt, synthetic construct
  source 1..23: mol_type = other RNA
gggatggattttcaccgattcta

SEQ ID NO: 6130 - RNA, 23 nt, synthetic construct
  source 1..23: mol_type = other RNA
gattctactttgaaaatgctttg

SEQ ID NO: 6131 - RNA, 23 nt, synthetic construct
  source 1..23: mol_type = other RNA
gctttgtccaaaagcaataaacc

SEQ ID NO: 6132 - RNA, 23 nt, synthetic construct
  source 1..23: mol_type = other RNA
aatccacactattattctaaacc

SEQ ID NO: 6133 - RNA, 23 nt, synthetic construct
  source 1..23: mol_type = other RNA
tctaaaccctcatgtacatctgg

SEQ ID NO: 6134 - RNA, 23 nt, synthetic construct
  source 1..23: mol_type = other RNA
gccgcctgcatagcatatattag

SEQ ID NO: 6135 - RNA, 23 nt, synthetic construct
  source 1..23: mol_type = other RNA
tgcagtcagaagagactcgtgtg

SEQ ID NO: 6136 - RNA, 23 nt, synthetic construct
  source 1..23: mol_type = other RNA
gtggcagaatgttcattttcatc

SEQ ID NO: 6137 - RNA, 23 nt, synthetic construct
  source 1..23: mol_type = other RNA
tcaccaacagtacccatcaagcc

SEQ ID NO: 6138 - RNA, 23 nt, synthetic construct
  source 1..23: mol_type = other RNA
caaatgggaaagaaaacttctca

SEQ ID NO: 6139 - RNA, 23 nt, synthetic construct
  source 1..23: mol_type = other RNA
cacctctttgtggcaaaacatct

SEQ ID NO: 6140 - RNA, 23 nt, synthetic construct
  source 1..23: mol_type = other RNA
catctaaggcctgaaaaccattc

SEQ ID NO: 6141 - RNA, 23 nt, synthetic construct
  source 1..23: mol_type = other RNA
tgggtcttctaaatttcaacagt

SEQ ID NO: 6142 - RNA, 23 nt, synthetic construct
  source 1..23: mol_type = other RNA
gccacttctgcattctctgttct

SEQ ID NO: 6143 - RNA, 23 nt, synthetic construct
  source 1..23: mol_type = other RNA
ctcctcttcatgcatgtttctga

SEQ ID NO: 6144 - RNA, 23 nt, synthetic construct
  source 1..23: mol_type = other RNA
gtcctacatgtaatgcatatgtg

SEQ ID NO: 6145 - RNA, 23 nt, synthetic construct
  source 1..23: mol_type = other RNA
atatgtgatgcatcatcttatca

SEQ ID NO: 6146 - RNA, 23 nt, synthetic construct
  source 1..23: mol_type = other RNA
cttatcatatattccttcctata

SEQ ID NO: 6147 - RNA, 23 nt, synthetic construct
  source 1..23: mol_type = other RNA
ttcctatacattgtttacacttc

SEQ ID NO: 6148 - RNA, 23 nt, synthetic construct
  source 1..23: mol_type = other RNA
ttccacacaaacttaaattactg

SEQ ID NO: 6149 - RNA, 23 nt, synthetic construct
  source 1..23: mol_type = other RNA
aattactgttggcaaaacaatag

SEQ ID NO: 6150 - RNA, 23 nt, synthetic construct
  source 1..23: mol_type = other RNA
ttccaagtacaactcttcatcaa

SEQ ID NO: 6151 - RNA, 23 nt, synthetic construct
  source 1..23: mol_type = other RNA
ttcatcaagtttctctgttaatg

SEQ ID NO: 6152 - RNA, 23 nt, synthetic construct
  source 1..23: mol_type = other RNA
aacagacttaagaactattgttc

SEQ ID NO: 6153 - RNA, 23 nt, synthetic construct
  source 1..23: mol_type = other RNA
tgttctctgaatgacagttgtaa

SEQ ID NO: 6154 - RNA, 23 nt, synthetic construct
  source 1..23: mol_type = other RNA
tagaactctttgctgttaatctg

SEQ ID NO: 6155 - RNA, 23 nt, synthetic construct
  source 1..23: mol_type = other RNA
tcctggttaaaatggatgatttt

SEQ ID NO: 6156 - RNA, 23 nt, synthetic construct
  source 1..23: mol_type = other RNA
cattgaaagttttgctgattaac

SEQ ID NO: 6157 - RNA, 23 nt, synthetic construct
  source 1..23: mol_type = other RNA
attaacaattaaagtgggatgat

SEQ ID NO: 6158 - RNA, 23 nt, synthetic construct
  source 1..23: mol_type = other RNA
gtgggcaaaatcacttatgaaag

SEQ ID NO: 6159 - RNA, 23 nt, synthetic construct
  source 1..23: mol_type = other RNA
agaagcaagaatcagttggtttg

SEQ ID NO: 6160 - RNA, 23 nt, synthetic construct
  source 1..23: mol_type = other RNA
ttggtttgctaccacataaagcc

SEQ ID NO: 6161 - RNA, 23 nt, synthetic construct
  source 1..23: mol_type = other RNA
gccatgctgtttttggtcaaact

SEQ ID NO: 6162 - RNA, 23 nt, synthetic construct
  source 1..23: mol_type = other RNA
gtcaaactgtgtaaactggaaaa

SEQ ID NO: 6163 - RNA, 23 nt, synthetic construct
  source 1..23: mol_type = other RNA
tttctgagtttaatcactttagg

SEQ ID NO: 6164 - RNA, 23 nt, synthetic construct
  source 1..23: mol_type = other RNA
ctttaggatatattcacattgtt

SEQ ID NO: 6165 - RNA, 23 nt, synthetic construct
  source 1..23: mol_type = other RNA
gaatttgctgaattgaattgttt

SEQ ID NO: 6166 - RNA, 23 nt, synthetic construct
  source 1..23: mol_type = other RNA
tctttctcaaatctgtgatctct

SEQ ID NO: 6167 - RNA, 23 nt, synthetic construct
  source 1..23: mol_type = other RNA
tgatctcttttctttatcctgtt

SEQ ID NO: 6168 - RNA, 23 nt, synthetic construct
  source 1..23: mol_type = other RNA
ttcctttcgtttgctttcttatt

SEQ ID NO: 6169 - RNA, 23 nt, synthetic construct
  source 1..23: mol_type = other RNA
cttttgttccattcttttcttac

SEQ ID NO: 6170 - RNA, 23 nt, synthetic construct
  source 1..23: mol_type = other RNA
ggctggctagtagtgtgtgagaa

SEQ ID NO: 6171 - RNA, 23 nt, synthetic construct
  source 1..23: mol_type = other RNA
gaagtgaaatttgcataatgaat

SEQ ID NO: 6172 - RNA, 23 nt, synthetic construct
  source 1..23: mol_type = other RNA
aaagggaaataaaagtcttttga

SEQ ID NO: 6173 - RNA, 23 nt, synthetic construct
  source 1..23: mol_type = other RNA
actagcacttttgatcatcttca

SEQ ID NO: 6174 - RNA, 23 nt, synthetic construct
  source 1..23: mol_type = other RNA
tgttgtcaagattttaaaggttt

SEQ ID NO: 6175 - RNA, 23 nt, synthetic construct
  source 1..23: mol_type = other RNA
aaggtttataattctgcttaagc

SEQ ID NO: 6176 - RNA, 23 nt, synthetic construct
  source 1..23: mol_type = other RNA
cttaagctctagtttggacttag

SEQ ID NO: 6177 - RNA, 23 nt, synthetic construct
  source 1..23: mol_type = other RNA
ggacttaggtatcctaactatgt

SEQ ID NO: 6178 - RNA, 23 nt, synthetic construct
  source 1..23: mol_type = other RNA
ggaggtatttgcattgtttaaag

SEQ ID NO: 6179 - RNA, 23 nt, synthetic construct
  source 1..23: mol_type = other RNA
ttaggataaaagcaagttcctcc

SEQ ID NO: 6180 - RNA, 23 nt, synthetic construct
  source 1..23: mol_type = other RNA
tcctgtgactgcaacgtcttact

SEQ ID NO: 6181 - RNA, 23 nt, synthetic construct
  source 1..23: mol_type = other RNA
gccaggaggataccaacttgata

SEQ ID NO: 6182 - RNA, 23 nt, synthetic construct
  source 1..23: mol_type = other RNA
catcatcactagctagttttcta

SEQ ID NO: 6183 - RNA, 23 nt, synthetic construct
  source 1..23: mol_type = other RNA
aggcttacaaatgtttgccattc

SEQ ID NO: 6184 - RNA, 23 nt, synthetic construct
  source 1..23: mol_type = other RNA
ataagtgttttgaacttgatctt

SEQ ID NO: 6185 - RNA, 23 nt, synthetic construct
  source 1..23: mol_type = other RNA
tgtgcttttttagcttctctctt

SEQ ID NO: 6186 - RNA, 23 nt, synthetic construct
  source 1..23: mol_type = other RNA
tctctcttgaatcagagtatcat

SEQ ID NO: 6187 - RNA, 23 nt, synthetic construct
  source 1..23: mol_type = other RNA
tcttcctccaaggagttagaatt

SEQ ID NO: 6188 - RNA, 23 nt, synthetic construct
  source 1..23: mol_type = other RNA
ttagaatttcccagtttaaaaca

SEQ ID NO: 6189 - RNA, 23 nt, synthetic construct
  source 1..23: mol_type = other RNA
taggttttctttgtgcttctcat

SEQ ID NO: 6190 - RNA, 23 nt, synthetic construct
  source 1..23: mol_type = other RNA
ttctcatttttcctttgttgatt

SEQ ID NO: 6191 - RNA, 23 nt, synthetic construct
  source 1..23: mol_type = other RNA
tcctgtgatttttgttctcttcc

SEQ ID NO: 6192 - RNA, 23 nt, synthetic construct
  source 1..23: mol_type = other RNA
ctcttccctgaagtgctttacag

SEQ ID NO: 6193 - RNA, 23 nt, synthetic construct
  source 1..23: mol_type = other RNA
tctccatcattgttattttaacg

SEQ ID NO: 6194 - RNA, 23 nt, synthetic construct
  source 1..23: mol_type = other RNA
cgatagtaattcacagtcctcag

SEQ ID NO: 6195 - RNA, 23 nt, synthetic construct
  source 1..23: mol_type = other RNA
gtcctcagaagcctatttttaaa

SEQ ID NO: 6196 - RNA, 23 nt, synthetic construct
  source 1..23: mol_type = other RNA
aaacaacccttcctcttttctct

SEQ ID NO: 6197 - RNA, 23 nt, synthetic construct
  source 1..23: mol_type = other RNA
ttctctcatctcacctctctgtg

SEQ ID NO: 6198 - RNA, 23 nt, synthetic construct
  source 1..23: mol_type = other RNA
tctctgtgttgattactaatcat

SEQ ID NO: 6199 - RNA, 23 nt, synthetic construct
  source 1..23: mol_type = other RNA
catcttagatattattgctagtg

SEQ ID NO: 6200 - RNA, 23 nt, synthetic construct
  source 1..23: mol_type = other RNA
gttgaagcttttctgataattat

SEQ ID NO: 6201 - RNA, 23 nt, synthetic construct
  source 1..23: mol_type = other RNA
tacagtaaatatattgagccatg

SEQ ID NO: 6202 - RNA, 23 nt, synthetic construct
  source 1..23: mol_type = other RNA
aatggcctcatttttctcttttt

SEQ ID NO: 6203 - RNA, 23 nt, synthetic construct
  source 1..23: mol_type = other RNA
ccttttgtgaagcagctatacgt

SEQ ID NO: 6204 - RNA, 23 nt, synthetic construct
  source 1..23: mol_type = other RNA
cgtggcatacatgtatttaaaga

SEQ ID NO: 6205 - RNA, 23 nt, synthetic construct
  source 1..23: mol_type = other RNA
gatgtagagtgttttttttacac

SEQ ID NO: 6206 - RNA, 23 nt, synthetic construct
  source 1..23: mol_type = other RNA
tttacacttttaacttagcatgt

SEQ ID NO: 6207 - RNA, 23 nt, synthetic construct
  source 1..23: mol_type = other RNA
tggtgttgaagtattactgtaga

SEQ ID NO: 6208 - RNA, 23 nt, synthetic construct
  source 1..23: mol_type = other RNA
ctgtagatcaagtttgtcttccg

SEQ ID NO: 6209 - RNA, 23 nt, synthetic construct
  source 1..23: mol_type = other RNA
gtcttccgcactaagatgtgagg

SEQ ID NO: 6210 - RNA, 23 nt, synthetic construct
  source 1..23: mol_type = other RNA
tgtgaggaaattgtgatttgttc

SEQ ID NO: 6211 - RNA, 23 nt, synthetic construct
  source 1..23: mol_type = other RNA
accacaaatgaattacacattta

SEQ ID NO: 6212 - RNA, 23 nt, synthetic construct
  source 1..23: mol_type = other RNA
tcttctatcattttgaaacactg

SEQ ID NO: 6213 - RNA, 23 nt, synthetic construct
  source 1..23: mol_type = other RNA
ggacactgtatatatttcttgcc

SEQ ID NO: 6214 - RNA, 23 nt, synthetic construct
  source 1..23: mol_type = other RNA
cttgccataatggtaaaggactg

SEQ ID NO: 6215 - RNA, 23 nt, synthetic construct
  source 1..23: mol_type = other RNA
aggactgattgatatatttaaga

SEQ ID NO: 6216 - RNA, 23 nt, synthetic construct
  source 1..23: mol_type = other RNA
tgcgtccatctttatttcttcag

SEQ ID NO: 6217 - RNA, 23 nt, synthetic construct
  source 1..23: mol_type = other RNA
ggcagtgtgtcctactctggtct

SEQ ID NO: 6218 - RNA, 23 nt, synthetic construct
  source 1..23: mol_type = other RNA
ctggtctcatttagtacataaca

SEQ ID NO: 6219 - RNA, 23 nt, synthetic construct
  source 1..23: mol_type = other RNA
acataacaatttgcacttggtga

SEQ ID NO: 6220 - RNA, 23 nt, synthetic construct
  source 1..23: mol_type = other RNA
caagttaattgttctctgtgagc

SEQ ID NO: 6221 - RNA, 23 nt, synthetic construct
  source 1..23: mol_type = other RNA
agcaaaacaatggtctcttctgg

SEQ ID NO: 6222 - RNA, 23 nt, synthetic construct
  source 1..23: mol_type = other RNA
ttgctgagaacaatatagttaac

SEQ ID NO: 6223 - RNA, 23 nt, synthetic construct
  source 1..23: mol_type = other RNA
gactcctaaaagcttctctaaac

SEQ ID NO: 6224 - RNA, 23 nt, synthetic construct
  source 1..23: mol_type = other RNA
cctccaatccagccttcacatgg

SEQ ID NO: 6225 - RNA, 23 nt, synthetic construct
  source 1..23: mol_type = other RNA
ttttttttaatacgaacctgtcc

SEQ ID NO: 6226 - RNA, 23 nt, synthetic construct
  source 1..23: mol_type = other RNA
gtaacactttgatgttatcattt

SEQ ID NO: 6227 - RNA, 23 nt, synthetic construct
  source 1..23: mol_type = other RNA
cccagcttgaacttgagcataca

SEQ ID NO: 6228 - RNA, 23 nt, synthetic construct
  source 1..23: mol_type = other RNA
tcagcttcttttgatttgctaaa

SEQ ID NO: 6229 - RNA, 23 nt, synthetic construct
  source 1..23: mol_type = other RNA
aaacatcacacttgctcacatgc

SEQ ID NO: 6230 - RNA, 23 nt, synthetic construct
  source 1..23: mol_type = other RNA
acatgcctgtttatgctgttcat

SEQ ID NO: 6231 - RNA, 23 nt, synthetic construct
  source 1..23: mol_type = other RNA
tcatgttgtttatgtttcttacc

SEQ ID NO: 6232 - RNA, 23 nt, synthetic construct
  source 1..23: mol_type = other RNA
tcttacctagaataaatagtctc

SEQ ID NO: 6233 - RNA, 23 nt, synthetic construct
  source 1..23: mol_type = other RNA
cctacttcttttcccgacttctt

SEQ ID NO: 6234 - RNA, 23 nt, synthetic construct
  source 1..23: mol_type = other RNA
tcttactttttcctaagattcag

SEQ ID NO: 6235 - RNA, 23 nt, synthetic construct
  source 1..23: mol_type = other RNA
tcagtgtacagcatcatgctcca

SEQ ID NO: 6236 - RNA, 23 nt, synthetic construct
  source 1..23: mol_type = other RNA
atgctccacagcaaaccttccta

SEQ ID NO: 6237 - RNA, 23 nt, synthetic construct
  source 1..23: mol_type = other RNA
tccctctcaaaacctacataata

SEQ ID NO: 6238 - RNA, 23 nt, synthetic construct
  source 1..23: mol_type = other RNA
agattgtatttacctctcctgtc

SEQ ID NO: 6239 - RNA, 23 nt, synthetic construct
  source 1..23: mol_type = other RNA
tcaaccacattgttttgaaaata

SEQ ID NO: 6240 - RNA, 23 nt, synthetic construct
  source 1..23: mol_type = other RNA
tatttctatttgtgtctcctcta

SEQ ID NO: 6241 - RNA, 23 nt, synthetic construct
  source 1..23: mol_type = other RNA
tcctctactgcagtataatgtct

SEQ ID NO: 6242 - RNA, 23 nt, synthetic construct
  source 1..23: mol_type = other RNA
ctgtgtattcatcattgcattcc

SEQ ID NO: 6243 - RNA, 23 nt, synthetic construct
  source 1..23: mol_type = other RNA
gaatggagatatcattgataaat

SEQ ID NO: 6244 - RNA, 23 nt, synthetic construct
  source 1..23: mol_type = other RNA
aagcccttttgataacagaagcc

SEQ ID NO: 6245 - RNA, 23 nt, synthetic construct
  source 1..23: mol_type = other RNA
cccagatagtccttgttttaatg

SEQ ID NO: 6246 - RNA, 23 nt, synthetic construct
  source 1..23: mol_type = other RNA
ctcaccactgtcttgatgctctg

SEQ ID NO: 6247 - RNA, 23 nt, synthetic construct
  source 1..23: mol_type = other RNA
gctctgagcaagttacctcttcc

SEQ ID NO: 6248 - RNA, 23 nt, synthetic construct
  source 1..23: mol_type = other RNA
cttccctctgaccctcagtttcc

SEQ ID NO: 6249 - RNA, 23 nt, synthetic construct
  source 1..23: mol_type = other RNA
cagtttccatatttgtaaaatga

SEQ ID NO: 6250 - RNA, 23 nt, synthetic construct
  source 1..23: mol_type = other RNA
aaatgagaataaacataccaact

SEQ ID NO: 6251 - RNA, 23 nt, synthetic construct
  source 1..23: mol_type = other RNA
ccaacttaataaagatattgtga

SEQ ID NO: 6252 - RNA, 23 nt, synthetic construct
  source 1..23: mol_type = other RNA
gtgactagaatgatatttgatag

SEQ ID NO: 6253 - RNA, 23 nt, synthetic construct
  source 1..23: mol_type = other RNA
atagaaattaaatggtagcagta

SEQ ID NO: 6254 - RNA, 23 nt, synthetic construct
  source 1..23: mol_type = other RNA
tagcagtataactattctgatca

SEQ ID NO: 6255 - RNA, 23 nt, synthetic construct
  source 1..23: mol_type = other RNA
atcactgacattaatattcctat

SEQ ID NO: 6256 - RNA, 23 nt, synthetic construct
  source 1..23: mol_type = other RNA
attgttattattctttgctcacg

SEQ ID NO: 6257 - RNA, 23 nt, synthetic construct
  source 1..23: mol_type = other RNA
atacaactcttgttttgctgttg

SEQ ID NO: 6258 - RNA, 23 nt, synthetic construct
  source 1..23: mol_type = other RNA
ctgccctctttatgtaggtttac

SEQ ID NO: 6259 - RNA, 23 nt, synthetic construct
  source 1..23: mol_type = other RNA
atatactcggactcaaatgtctc

SEQ ID NO: 6260 - RNA, 23 nt, synthetic construct
  source 1..23: mol_type = other RNA
agacaccaaatgaagtggtcatc

SEQ ID NO: 6261 - RNA, 23 nt, synthetic construct
  source 1..23: mol_type = other RNA
tagtagcaaatcagtatattcta

SEQ ID NO: 6262 - RNA, 23 nt, synthetic construct
  source 1..23: mol_type = other RNA
ttcaaggaatattaatcttcacc

SEQ ID NO: 6263 - RNA, 23 nt, synthetic construct
  source 1..23: mol_type = other RNA
cttcacccaaattttgaattttt

SEQ ID NO: 6264 - RNA, 23 nt, synthetic construct
  source 1..23: mol_type = other RNA
tcgagtgatttcattgaataaaa

SEQ ID NO: 6265 - RNA, 23 nt, synthetic construct
  source 1..23: mol_type = other RNA
gaataaaattctactgacttcta

SEQ ID NO: 6266 - RNA, 23 nt, synthetic construct
  source 1..23: mol_type = other RNA
agccgggacttcagcatgtttct

SEQ ID NO: 6267 - RNA, 23 nt, synthetic construct
  source 1..23: mol_type = other RNA
atggaagagccgccgggacttca

SEQ ID NO: 6268 - RNA, 23 nt, synthetic construct
  source 1..23: mol_type = other RNA
aacgacaggttaccgggctcgga

SEQ ID NO: 6269 - RNA, 23 nt, synthetic construct
  source 1..23: mol_type = other RNA
aagttgcgaaacgatccgcactg

SEQ ID NO: 6270 - RNA, 23 nt, synthetic construct
  source 1..23: mol_type = other RNA
aggacgagtggcaagcagttgcg

SEQ ID NO: 6271 - RNA, 23 nt, synthetic construct
  source 1..23: mol_type = other RNA
aggaaatggaaaaacagccaggc

SEQ ID NO: 6272 - RNA, 23 nt, synthetic construct
  source 1..23: mol_type = other RNA
agagatgaccagaaagggtggcg

SEQ ID NO: 6273 - RNA, 23 nt, synthetic construct
  source 1..23: mol_type = other RNA
agcaggttgtggtcgaagccatc

SEQ ID NO: 6274 - RNA, 23 nt, synthetic construct
  source 1..23: mol_type = other RNA
atcgaaaagctgatactcgtccg

SEQ ID NO: 6275 - RNA, 23 nt, synthetic construct
  source 1..23: mol_type = other RNA
agtccagtaggaattttcataca

SEQ ID NO: 6276 - RNA, 23 nt, synthetic construct
  source 1..23: mol_type = other RNA
agtgttgataattttggcagcat

SEQ ID NO: 6277 - RNA, 23 nt, synthetic construct
  source 1..23: mol_type = other RNA
atttctgatgatccctagcagaa

SEQ ID NO: 6278 - protein, 29 aa, synthetic construct
  REGION 1..29: note = Synthetic
AALEALAEALEALAEALEALAEAAAAGGC

SEQ ID NO: 6279 - protein, 30 aa, synthetic construct
  REGION 1..30: note = Synthetic
AALAEALAEALAEALAEALAEALAAAAGGC

SEQ ID NO: 6280 - protein, 15 aa, synthetic construct
  REGION 1..15: note = Synthetic
ALEALAEALEALAEA

SEQ ID NO: 6281 - protein, 22 aa, synthetic construct
  REGION 1..22: note = Synthetic
GLFEAIEGFIENGWEGMIWDYG

SEQ ID NO: 6282 - protein, 23 aa, synthetic construct
  REGION 1..23: note = Synthetic
GLFGAIAGFIENGWEGMIDGWYG

SEQ ID NO: 6283 - protein, 48 aa, synthetic construct
  REGION 1..48: note = Synthetic
GLFEAIEGFIENGWEGMIDGWYGCGLFEAIEGFIENGWEGMIDGWYGC

SEQ ID NO: 6284 - protein, 44 aa, synthetic construct
  REGION 1..44: note = Synthetic
GLFEAIEGFIENGWEGMIDGGCGLFEAIEGFIENGWEGMIDGGC

SEQ ID NO: 6285 - protein, 35 aa, synthetic construct
  REGION 1..35: note = Synthetic
GLFGALAEALAEALAEHLAEALAEALEALAAGGSC

SEQ ID NO: 6286 - protein, 34 aa, synthetic construct
  REGION 1..34: note = Synthetic
GLFEAIEGFIENGWEGLAEALAEALEALAAGGSC

SEQ ID NO: 6287 - protein, 41 aa, synthetic construct
  REGION 1..41: note = Synthetic
  SITE 12: note = misc_feature - X is norleucine
  SITE 17: note = misc_feature - X is norleucine
  SITE 33: note = misc_feature - X is norleucine
  SITE 38: note = misc_feature - X is norleucine
GLFEAIEGFIEXGWEGXIDGKGLFEAIEGFIEXGWEGXIDG

SEQ ID NO: 6288 - protein, 19 aa, synthetic construct
  REGION 1..19: note = Synthetic
LFEALLELLESLWELLLEA

SEQ ID NO: 6289 - protein, 20 aa, synthetic construct
  REGION 1..20: note = Synthetic
GLFKALLKLLKSLWKLLLKA

SEQ ID NO: 6290 - protein, 20 aa, synthetic construct
  REGION 1..20: note = Synthetic
GLFRALLRLLRSLWRLLLRA

SEQ ID NO: 6291 - protein, 30 aa, synthetic construct
  REGION 1..30: note = Synthetic
WEAKLAKALAKALAKHLAKALAKALKACEA

SEQ ID NO: 6292 - protein, 22 aa, synthetic construct
  REGION 1..22: note = Synthetic
GLFFEAIAEFIEGGWEGLIEGC

SEQ ID NO: 6293 - protein, 26 aa, synthetic construct
  REGION 1..26: note = Synthetic
GIGAVLKVLTTGLPALISWIKRKRQQ

SEQ ID NO: 6294 - protein, 16 aa, synthetic construct
  REGION 1..16: note = Synthetic
RQIKIWFQNRRMKWKK

SEQ ID NO: 6295 - protein, 14 aa, synthetic construct
  REGION 1..14: note = Synthetic
GRKKRRQRRRPPQC

SEQ ID NO: 6296 - protein, 27 aa, synthetic construct
  REGION 1..27: note = Synthetic
GALFLGWLGAAGSTMGAWSQPKKKRKV

SEQ ID NO: 6297 - protein, 18 aa, synthetic construct
  REGION 1..18: note = Synthetic
LLIILRRRIRKQAHAHSK

SEQ ID NO: 6298 - protein, 26 aa, synthetic construct
  REGION 1..26: note = Synthetic
GWTLNSAGYLLKINLKALAALAKKIL

SEQ ID NO: 6299 - protein, 18 aa, synthetic construct
  REGION 1..18: note = Synthetic
KLALKLALKALKAALKLA

SEQ ID NO: 6300 - protein, 9 aa, synthetic construct
  REGION 1..9: note = Synthetic
RRRRRRRRR

SEQ ID NO: 6301 - protein, 10 aa, synthetic construct
  REGION 1..10: note = Synthetic
KFFKFFKFFK

SEQ ID NO: 6302 - protein, 37 aa, synthetic construct
  REGION 1..37: note = Synthetic
LLGDFFRKSKEKIGKEFKRIVQRIKDFLRNLVPRTES

SEQ ID NO: 6303 - protein, 31 aa, synthetic construct
  REGION 1..31: note = Synthetic
SWLSKTAKKLENSAKKRISEGIAIAIQGGPR

SEQ ID NO: 6304 - protein, 30 aa, synthetic construct
  REGION 1..30: note = Synthetic
ACYCRIPACIAGERRYGTCIYQGRLWAFCC

SEQ ID NO: 6305 - protein, 36 aa, synthetic construct
  REGION 1..36: note = Synthetic
DHYNCVSSGGQCLYSACPIFTKIQGTCYRGKAKCCK

SEQ ID NO: 6306 - protein, 42 aa, synthetic construct
  REGION 1..42: note = Synthetic
  MOD_RES 1..42: note = 3' NH2
RRRPRPPYLPRPRPPPFFPPRLPPRIPPGFPPRFPPRFPGKR

SEQ ID NO: 6307 - protein, 13 aa, synthetic construct
  REGION 1..13: note = Synthetic
  MOD_RES 1..13: note = 3' NH2
ILPWKWPWWPWRR

SEQ ID NO: 6308 - protein, 16 aa, synthetic construct
  REGION 1..16: note = Synthetic
AAVALLPAVLLALLAP

SEQ ID NO: 6309 - protein, 11 aa, synthetic construct
  REGION 1..11: note = Synthetic
AALLPVLLAAP

SEQ ID NO: 6310 - protein, 12 aa, synthetic construct
  REGION 1..12: note = Synthetic
RKCRIVVIRVCR

SEQ ID NO: 6311 - RNA, 21 nt, synthetic construct
  modified_base 20..21: mod_base = OTHER; note = thymine
  misc_feature 1..21: note = Synthetic
  modified_base 1: mod_base = OTHER; note = cytidine-3'-phosphate
  modified_base 2: mod_base = OTHER; note = Uridine-3'-phosphate
  modified_base 3: mod_base = OTHER; note = Uridine-3'-phosphate
  modified_base 4: mod_base = OTHER; note = Adenosine-3'-phosphate
  modified_base 5: mod_base = OTHER; note = cytidine-3'-phosphate
  modified_base 6: mod_base = OTHER; note = guanosine-3'-phosphate
  modified_base 7: mod_base = OTHER; note = cytidine-3'-phosphate
  modified_base 8: mod_base = OTHER; note = Uridine-3'-phosphate
  modified_base 9: mod_base = OTHER; note = guanosine-3'-phosphate
  modified_base 10: mod_base = OTHER; note = Adenosine-3'-phosphate
  modified_base 11: mod_base = OTHER; note = guanosine-3'-phosphate
  modified_base 12: mod_base = OTHER; note = Uridine-3'-phosphate
  modified_base 13: mod_base = OTHER; note = Adenosine-3'-phosphate
  modified_base 14: mod_base = OTHER; note = cytidine-3'-phosphate
  modified_base 15: mod_base = OTHER; note = Uridine-3'-phosphate
  modified_base 16: mod_base = OTHER; note = Uridine-3'-phosphate
  modified_base 17: mod_base = OTHER; note = cytidine-3'-phosphate
  modified_base 18: mod_base = OTHER; note = guanosine-3'-phosphate
  modified_base 19: mod_base = OTHER; note = Adenosine-3'-phosphate
  modified_base 20: mod_base = OTHER; note = 5-methyluridine-3'-phosphorothioate
  modified_base 21: mod_base = OTHER; note = 5'-methyluridine-3'-phosphate
  source 1..21: mol_type = other RNA
cttacgctgagtacttcgatt

SEQ ID NO: 6312 - RNA, 21 nt, synthetic construct
  misc_feature 1..21: note = Synthetic
  modified_base 1: mod_base = OTHER; note = Uridine-3'-phosphate
  modified_base 2: mod_base = OTHER; note = cytidine-3'-phosphate
  modified_base 3: mod_base = OTHER; note = guanosine-3'-phosphate
  modified_base 4: mod_base = OTHER; note = Adenosine-3'-phosphate
  modified_base 5: mod_base = OTHER; note = Adenosine-3'-phosphate
  modified_base 6: mod_base = OTHER; note = guanosine-3'-phosphate
  modified_base 7: mod_base = OTHER; note = Uridine-3'-phosphate
  modified_base 8: mod_base = OTHER; note = Adenosine-3'-phosphate
  modified_base 9: mod_base = OTHER; note = cytidine-3'-phosphate
  modified_base 10: mod_base = OTHER; note = Uridine-3'-phosphate
  modified_base 11: mod_base = OTHER; note = cytidine-3'-phosphate
  modified_base 12: mod_base = OTHER; note = Adenosine-3'-phosphate
  modified_base 13: mod_base = OTHER; note = guanosine-3'-phosphate
  modified_base 14: mod_base = OTHER; note = cytidine-3'-phosphate
  modified_base 15: mod_base = OTHER; note = guanosine-3'-phosphate
  modified_base 16: mod_base = OTHER; note = Uridine-3'-phosphate
  modified_base 17: mod_base = OTHER; note = Adenosine-3'-phosphate
  modified_base 18: mod_base = OTHER; note = Adenosine-3'-phosphate
  modified_base 19: mod_base = OTHER; note = guanosine-3'-phosphate
  modified_base 20: mod_base = OTHER; note = 5-methyluridine-3'-phosphorothioate
  modified_base 21: mod_base = OTHER; note = 5'-methyluridine-3'-phosphate
  source 1..21: mol_type = other RNA
  modified_base 20..21: mod_base = OTHER; note = thymine
tcgaagtactcagcgtaagtt
